(19) United States
(12) Patent Application Publication
(10) Pub. No.: US 2023/0003719 A1
(43) Pub. Date: Jan. 5, 2023

(54) MATERIALS AND METHODS FOR INFLAMMATORY MOLECULAR MARKERS

(71) Applicant: Janssen Biotech, Inc., Horsham, PA (US)

(72) Inventors: Ernesto MUNOZ, Horsham, PA (US); Julianty ANGSANA, Horsham, PA (US); Carl MANTHEY, Horsham, PA (US); Xuejun LIU, Horsham, PA (US)

(21) Appl. No.: 17/757,201

(22) PCT Filed: Dec. 11, 2020
(86) PCT No.: PCT/US2020/064622

§ 371 Date: Jun. 10, 2022

Related U.S. Application Data
(60) Provisional application No. 62/948,121, filed on Dec. 13, 2019.
(60) Provisional application No. 63/055,719, filed on Jul. 23, 2020.

(51) Int. Cl. G01N 33/50; G01N 33/53; G01N 33/68

(52) U.S. Cl. CPC G01N 33/5044; G01N 33/53; G01N 33/68; G01N 2333/495; G01N 2333/535; G01N 2333/54

(57) ABSTRACT

A method of determining a pharmacodynamics or pharmacokinetic effect of an inhibitor of IL 1α comprising providing a sample from a subject; administering the inhibitor of IL 1α to the sample; measuring levels of one or more biomarkers in the sample; and determining the pharmacodynamic or the pharmacokinetic effect of the inhibitor of IL 1α based on the levels of the one or more biomarkers.

### CROSS-REFERENCE TO RELATED APPLICATIONS

[0001] The present application claims the priority of U.S. provisional patent application Ser. No. 62/948,121 filed on Dec. 13, 2019 , and U.S. provisional patent application Ser. No. 63/055,719 filed on Jul. 23, 2020.

### 1. FIELD

[0002] Provided herein, in some embodiments, are methods of using certain biomarkers in assessing and monitoring a pharmacodynamics or pharmacokinetic effect of an inhibitor of Interleukin 1 alpha (IL1α), and in predicting and monitoring clinical sensitivity and therapeutic response to an inhibitor of IL1α, and kits for performing same. Also provided herein, in certain embodiments, are methods of screening or identifying an inhibitor of IL1α.

### 2. BACKGROUND

[0003] Inflammation is a common pathogenesis of many diseases, including cardiovascular and bowel diseases, diabetes, arthritis, and cancer. Inflammation is a biological response of the immune system that can be triggered by a variety of factors, including pathogens, damaged cells and toxic compounds. These factors may induce acute and/or chronic inflammatory responses in the heart, pancreas, liver, kidney, lung, brain, intestinal tract and reproductive system, potentially leading to tissue damage or disease. Chen et al., Oncotarget. 9(6): 7204-7218 (2018).

[0004] In response to tissue injury, the body initiates a chemical signaling cascade that stimulates responses aimed at healing affected tissues. These signals activate leukocyte chemotaxis from the general circulation to sites of damage. Id.

[0005] IL1α is a cytokine of the interleukin 1 family that is encoded by the IL1A gene in humans. In general, Interleukin 1 is responsible for the production of inflammation. IL1α inhibitors are being developed to interrupt those processes and treat diseases. Blocking the activity of IL1α has the potential to treat various diseases or conditions including skin diseases such as acne. See, e.g., Valente Duarte de Sousa, Expert Opinion on Investigational Drugs. 23 (10): 1389-410 (2014).

[0006] There is a need in the art to assess effects (including a pharmacodynamics or pharmacokinetic effect) of IL1α inhibitors as well as identifying additional IL1α inhibitors for therapeutic or other uses.

### 3. SUMMARY OF THE INVENTION

[0007] In one aspect, provided herein is a method of determining a pharmacodynamics or pharmacokinetic effect of an inhibitor of IL1α comprising:
[0008] i. providing a sample from a subject;
[0009] ii. administering the inhibitor of IL1α to the sample;
[0010] iii. measuring levels of one or more biomarkers in the sample;
[0011] iv. determining the pharmacodynamic or the pharmacokinetic effect of the inhibitor of IL1α based on the levels of the one or more biomarkers as measured in step (iii).

[0012] In another aspect, provided herein is a method of monitoring the response of a subject to a treatment comprising an inhibitor of IL1α, comprising:
[0013] i. providing a sample from the subject;
[0014] ii. administering the inhibitor of IL1α to the sample;
[0015] iii. measuring levels of one or more biomarkers in the sample;
[0016] iv. monitoring the response of the subject to a treatment comprising the inhibitor of IL1α, based on the levels of the one or more biomarkers as measured in step (iii).

[0017] In some embodiments, the sample comprises a skin cell. In some embodiments, the sample comprises an injured skin cell. In some embodiments, the sample is obtained by a skin biopsy procedure. In some embodiments, the size of the sample is about 3.5 mm to 4.5 mm.

[0018] In some embodiments, the method further comprises culturing the sample ex vivo prior to administering the inhibitor of IL1α to the sample. In other embodiments, the method further comprises culturing the sample ex vivo after administering the inhibitor of IL1α to the sample. In yet other embodiments, the inhibitor of IL1α is administered to the sample while culturing the sample ex vivo.

[0019] In some embodiments, the levels of the one or more biomarkers are measured at least 4 hours, at least 5 hours, at least 10 hours, at least 15 hours, at least 20 hours, at least 21 hours, at least 22 hours, at least 23 hours, or at least 24 hours post the administration of the inhibitor of IL1α and/or post the sample is obtained from the subject. In some embodiments, the level of the one or more biomarkers are measured at about 24 hours post the administration of the inhibitor of IL1α or post the sample is obtained from the subject.

[0020] In some embodiments, the method further comprises comparing the levels of the one or more biomarkers with reference levels of the one or more biomarkers. In some embodiments, the reference levels of the one or more biomarkers are the levels of the one or more biomarkers in a reference sample from the subject prior to administration of the inhibitor of IL1α. In other embodiments, the reference levels of the one or more biomarkers are the levels of the one or more biomarkers in a reference sample from the subject without administration of the inhibitor of IL1α. In yet other embodiments, the reference levels of the one or more biomarkers are pre-determined levels of the one or more biomarkers. In yet other embodiments, the reference levels of the one or more biomarkers are the levels of the one or more biomarkers in a reference sample administered with a control agent. In other embodiments, the control agent is a positive control agent that inhibits IL1α. In other embodiments, the control agent is a negative control agent that does not inhibit IL1α.

[0021] In some embodiments, the lower levels of the one or more biomarkers as compared with reference levels of the one or more biomarkers indicates the subject is likely to be responsive to the treatment comprising the inhibitor of IL1α, or wherein the subject is identified likely to be responsive to the treatment comprising the inhibitor of IL1α if the levels of the one or more biomarkers in the sample are at least 30%, at least 35%, at least 40%, or at least 50% less than the reference levels.

[0022] In some embodiments, the levels of the one or more biomarkers are the expression levels of one or more biomarkers selected from a group consisting of GCSF (CSF3), CXCL1, IL6, IL8, IL4, MDC, IP10, GMCSF (CSF2), MIP1a, TGFa, CCL20, CCL22, CXCL2, CXCL3, CXCL5, CXCL6, IL1B, PTGS2, CCL3, CCL4, CCL8, CFB, MMP3, FDCSP, PTX3, CCL3L3, CXCL8, FGF2, NEFM, TNIP3, MMP10, ADORA2A, DEFB4A, GPR84, AC243829.4, COLQ, TFPI2, SPRR2A, OXTR, CCL4L2, MMP1, TNFAIP6, HMX3, LIF, CD274, AC073862.2, TNFRSF11B, AC003092.1, SALL1, AC084871.4, CD38, NFKBIZ, ZC3H12A, SLC4A4, AL139393.3, MSC, SLC1A2, CCL2, GOS2, SLC34A2, AC073611.1, AC106865.1, AL078604.2, INHBA, LCN2, AC009303.4, TDO2, NGF, IER3, BCL2A1, SOD2, CEMIP, SAA1, TRAF1, GCH1, AC007780.1, AC007998.3, TMC1, GRM1, SPINK6, CD1D, IL17C, AC004264.1, EDNRB, DRAM1, CH25H, FOXD4L1, PTGES, SAA2, SLC39A14, RIPK2, PANX2, HS3ST3B1, IL23A, ROR1-AS1, AP002784.1, TMEM132A, ADAMTS5, OSM, RGS3, BMP6, STC1, SIRPA, RFX8, TMEM158, PAX1, IL24, ODAM, BCAT1, AC099494.2, ZNF697, C2CD4A, CCRL2, LAMA1, LSS, TGFB3, TM4SF1, CCL7, FFAR3, QPCTL, GRAMD1A, DNAJB5, ARSG, NRP2, INSM1, ICAM1, REP15, ACSL4, AC073862.5, LYN, AKR1C1, SDK1, THBS2, IL4I1, PILRA, SLC39A8, NEU4, MT1A, NRIP3, C2CD4B, ASPHD1, SLC11A1, SPRR2B, NFKB2, TNFRSF9, and NKX3-1.

[0023] In some embodiments, the levels of the one or more biomarkers are the expression levels of one or more biomarkers selected from a group consisting of GCSF (CSF3), CXCL1, IL6, GMCSF (CSF2), CCL20, CCL22, CXCL2, CXCL3, CXCL5, IL1B, PTGS2, CCL3, CCL4, CCL8, CFB, MMP3, FDCSP, PTX3, CCL3L3, CXCL8, FGF2, NEFM, TNIP3, MMP10, ADORA2A, DEFB4A, GPR84, AC243829.4, COLQ, TFPI2, SPRR2A, OXTR, CCL4L2, MMP1, TNFAIP6, HMX3, LIF, CD274, AC073862.2, TNFRSF11B, AC003092.1, SALL1, AC084871.4, CD38, NFKBIZ, ZC3H12A, SLC4A4, AL139393.3, MSC, SLC1A2, CCL2, GOS2, SLC34A2, AC073611.1, AC106865.1, AL078604.2, INHBA, LCN2, AC009303.4, TDO2, NGF, IER3, BCL2A1, SOD2, CEMIP, SAA1, TRAF1, GCH1, AC007780.1, AC007998.3, TMC1, GRM1, SPINK6, CD1D, IL17C, AC004264.1, EDNRB, DRAM1, CH25H, FOXD4L1, PTGES, SAA2, SLC39A14, RIPK2, PANX2, HS3ST3B1, IL23A, ROR1-AS1, AP002784.1, TMEM132A, ADAMTS5, OSM, RGS3, BMP6, STC1, SIRPA, RFX8, TMEM158, PAX1, IL24, ODAM, BCAT1, AC099494.2, ZNF697, C2CD4A, CCRL2, LAMA1, LSS, TGFB3, TM4SF1, CCL7, FFAR3, QPCTL, GRAMD1A, DNAJB5, ARSG, NRP2, INSM1, ICAM1, REP15, ACSL4, AC073862.5, LYN, AKR1C1, SDK1, THBS2, IL4I1, PILRA, SLC39A8, NEU4, MT1A, NRIP3, C2CD4B, ASPHD1, SLC11A1, SPRR2B, NFKB2, TNFRSF9, and NKX3-1.

[0024] In some embodiments, the levels of the one or more biomarkers are the expression levels of one or more biomarkers selected from a group consisting of CCL20, CCL22, CSF3(GCSF), CXCL1, CXCL2, CXCL3, CXCL5, CXCL6, IL6, IL8, PTGS2, CCL3, CCL4, CCL8, CFB, IL1B, and MMP3.

[0025] In some embodiments, the levels of the one or more biomarkers are the expression levels of one or more biomarkers selected from a group consisting of CCL20, CCL22, CSF3(GCSF), CXCL1, CXCL2, CXCL3, CXCL5, CXCL6, IL6, IL8, and PTGS2. In other embodiments, the levels of the one or more biomarkers are the expression levels of one or more biomarkers selected from a group consisting of CCL20, CCL3, CCL4, CCL8, CFB, CSF3(GCSF), CXCL1, CXCL2, CXCL3, CXCL5, IL1B, IL6, IL8, MMP3, and PTGS2.

[0026] In some embodiments, the one or more biomarkers comprises CCL20. In some embodiments, the one or more biomarkers comprises CCL22. In some embodiments, the one or more biomarkers comprises CSF3. In other embodiments, the one or more biomarkers comprises CXCL1. In other embodiments, the one or more biomarkers comprises CXCL2. In other embodiments, the one or more biomarkers comprises CXCL3. In other embodiments, the one or more biomarkers comprises CXCL5. In other embodiments, the one or more biomarkers comprises CXCL6. In yet other embodiments, the one or more biomarkers comprises IL6. In yet other embodiments, the one or more biomarkers comprises IL8. In yet other embodiments, the one or more biomarkers comprises PTGS2. In yet other embodiments, the one or more biomarkers comprises CCL3. In yet other embodiments, the one or more biomarkers comprises CCL4. In yet other embodiments, the one or more biomarkers comprises CCL8. In yet other embodiments, the one or more biomarkers comprises CFB. In yet other embodiments, the one or more biomarkers comprises IL1B. In yet other embodiments, the one or more biomarkers comprises MMP3.

[0027] In one embodiment, the one or more biomarkers comprise CSF3 (GCSF). In another embodiment, the one ore more biomarkers comprise CXCL1. In another embodiment, the one or more biomarkers comprise IL6.

[0028] In some embodiments, the one or more biomarkers are GCSF (CSF3), CXCL1, IL6, IL8, IL4, MDC, IP10, GMCSF (CSF2), MIP1a, TGFa, CCL20, CCL22, CXCL2, CXCL3, CXCL5, CXCL6, IL1B, PTGS2, CCL3, CCL4, CCL8, CFB, MMP3, FDCSP, PTX3, CCL3L3, CXCL8, FGF2, NEFM, TNIP3, MMP10, ADORA2A, DEFB4A, GPR84, AC243829.4, COLQ, TFPI2, SPRR2A, OXTR, CCL4L2, MMP1, TNFAIP6, HMX3, LIF, CD274, AC073862.2, TNFRSF11B, AC003092.1, SALL1, AC084871.4, CD38, NFKBIZ, ZC3H12A, SLC4A4, AL139393.3, MSC, SLC1A2, CCL2, GOS2, SLC34A2, AC073611.1, AC106865.1, AL078604.2, INHBA, LCN2, AC009303.4, TDO2, NGF, IER3, BCL2A1, SOD2, CEMIP, SAA1, TRAF1, GCH1, AC007780.1, AC007998.3, TMC1, GRM1, SPINK6, CD1D, IL17C, AC004264.1, EDNRB, DRAM1, CH25H, FOXD4L1, PTGES, SAA2, SLC39A14, RIPK2, PANX2, HS3ST3B1, IL23A, ROR1-AS1, AP002784.1, TMEM132A, ADAMTS5, OSM, RGS3, BMP6, STC1, SIRPA, RFX8, TMEM158, PAX1, IL24, ODAM, BCAT1, AC099494.2, ZNF697, C2CD4A, CCRL2, LAMA1, LSS, TGFB3, TM4SF1, CCL7, FFAR3, QPCTL, GRAMD1A, DNAJB5, ARSG, NRP2, INSM1, ICAM1, REP15, ACSL4, AC073862.5, LYN, AKR1C1, SDK1, THBS2, IL4I1, PILRA, SLC39A8, NEU4, MT1A, NRIP3, C2CD4B, ASPHD1, SLC11A1, SPRR2B, NFKB2, TNFRSF9, and NKX3-1. In some embodiments, a composite score is calculated based on the levels of GCSF (CSF3), CXCL1, IL6, IL8, IL4, MDC, IP10, GMCSF (CSF2), MIP1a, TGFa, CCL20, CCL22, CXCL2, CXCL3, CXCL5, CXCL6, IL1B, PTGS2, CCL3, CCL4, CCL8, CFB, MMP3, FDCSP, PTX3, CCL3L3, CXCL8, FGF2, NEFM, TNIP3, MMP10, ADORA2A, DEFB4A, GPR84, AC243829.4, COLQ, TFPI2, SPRR2A, OXTR, CCL4L2, MMP1, TNFAIP6, HMX3, LIF, CD274, AC073862.2, TNFRSF11B, AC003092.1, SALL1, AC084871.4, CD38, NFKBIZ, ZC3H12A, SLC4A4, AL139393.3, MSC, SLC1A2, CCL2, GOS2, SLC34A2, AC073611.1, AC106865.1, AL078604.2, INHBA, LCN2, AC009303.4, TDO2, NGF, IER3, BCL2A1, SOD2, CEMIP, SAA1, TRAF1, GCH1, AC007780.1, AC007998.3, TMC1, GRM1, SPINK6, CD1D, IL17C, AC004264.1, EDNRB, DRAM1, CH25H, FOXD4L1, PTGES, SAA2, SLC39A14, RIPK2, PANX2, HS3ST3B1, IL23A, ROR1-AS1, AP002784.1, TMEM132A, ADAMTS5, OSM, RGS3, BMP6, STC1, SIRPA, RFX8, TMEM158, PAX1, IL24, ODAM, BCAT1, AC099494.2, ZNF697, C2CD4A, CCRL2, LAMA1, LSS, TGFB3, TM4SF1, CCL7, FFAR3, QPCTL, GRAMD1A, DNAJB5, ARSG, NRP2, INSM1, ICAM1, REP15, ACSL4, AC073862.5, LYN, AKR1C1, SDK1, THBS2, IL4I1, PILRA, SLC39A8, NEU4, MT1A, NRIP3, C2CD4B, ASPHD1, SLC11A1, SPRR2B, NFKB2, TNFRSF9, and NKX3-1, and wherein the method further comprises comparing the composite score to a reference score.

[0029] In some embodiments, the one or more biomarkers are GCSF (CSF3), CXCL1, IL6, GMCSF (CSF2), CCL20, CCL22, CXCL2, CXCL3, CXCL5, IL1B, PTGS2, CCL3, CCL4, CCL8, CFB, MMP3, FDCSP, PTX3, CCL3L3, CXCL8, FGF2, NEFM, TNIP3, MMP10, ADORA2A, DEFB4A, GPR84, AC243829.4, COLQ, TFPI2, SPRR2A, OXTR, CCL4L2, MMP1, TNFAIP6, HMX3, LIF, CD274, AC073862.2, TNFRSF11B, AC003092.1, SALL1, AC084871.4, CD38, NFKBIZ, ZC3H12A, SLC4A4, AL139393.3, MSC, SLC1A2, CCL2, GOS2, SLC34A2, AC073611.1, AC106865.1, AL078604.2, INHBA, LCN2, AC009303.4, TDO2, NGF, IER3, BCL2A1, SOD2, CEMIP, SAA1, TRAF1, GCH1, AC007780.1, AC007998.3, TMC1, GRM1, SPINK6, CD1D, IL17C, AC004264.1, EDNRB, DRAM1, CH25H, FOXD4L1, PTGES, SAA2, SLC39A14, RIPK2, PANX2, HS3ST3B1, IL23A, ROR1-AS1, AP002784.1, TMEM132A, ADAMTS5, OSM, RGS3, BMP6, STC1, SIRPA, RFX8, TMEM158, PAX1, IL24, ODAM, BCAT1, AC099494.2, ZNF697, C2CD4A, CCRL2, LAMA1, LSS, TGFB3, TM4SF1, CCL7, FFAR3, QPCTL, GRAMD1A, DNAJB5, ARSG, NRP2, INSM1, ICAM1, REP15, ACSL4, AC073862.5, LYN, AKR1C1, SDK1, THBS2, IL4I1, PILRA, SLC39A8, NEU4, MT1A, NRIP3, C2CD4B, ASPHD1, SLC11A1, SPRR2B, NFKB2, TNFRSF9, and NKX3-1. In some embodiments, a composite score is calculated based on the levels of GCSF (CSF3), CXCL1, IL6, GMCSF (CSF2), CCL20, CCL22, CXCL2, CXCL3, CXCL5, IL1B, PTGS2, CCL3, CCL4, CCL8, CFB, MMP3, FDCSP, PTX3, CCL3L3, CXCL8, FGF2, NEFM, TNIP3, MMP10, ADORA2A, DEFB4A, GPR84, AC243829.4, COLQ, TFPI2, SPRR2A, OXTR, CCL4L2, MMP1, TNFAIP6, HMX3, LIF, CD274, AC073862.2, TNFRSF11B, AC003092.1, SALL1, AC084871.4, CD38, NFKBIZ, ZC3H12A, SLC4A4, AL139393.3, MSC, SLC1A2, CCL2, GOS2, SLC34A2, AC073611.1, AC106865.1, AL078604.2, INHBA, LCN2, AC009303.4, TDO2, NGF, IER3, BCL2A1, SOD2, CEMIP, SAA1, TRAF1, GCH1, AC007780.1, AC007998.3, TMC1, GRM1, SPINK6, CD1D, IL17C, AC004264.1, EDNRB, DRAM1, CH25H, FOXD4L1, PTGES, SAA2, SLC39A14, RIPK2, PANX2, HS3ST3B1, IL23A, ROR1-AS1, AP002784.1, TMEM132A, ADAMTS5, OSM, RGS3, BMP6, STC1, SIRPA, RFX8, TMEM158, PAX1, IL24, ODAM, BCAT1, AC099494.2, ZNF697, C2CD4A, CCRL2, LAMA1, LSS, TGFB3, TM4SF1, CCL7, FFAR3, QPCTL, GRAMD1A, DNAJB5, ARSG, NRP2, INSM1, ICAM1, REP15, ACSL4, AC073862.5, LYN, AKR1C1, SDK1, THBS2, IL4I1, PILRA, SLC39A8, NEU4, MT1A, NRIP3, C2CD4B, ASPHD1, SLC11A1, SPRR2B, NFKB2, TNFRSF9, and NKX3-1, and wherein the method further comprises comparing the composite score to a reference score.

[0030] In some embodiments, the one or more biomarkers are CCL20, CCL22, CSF3(GCSF), CXCL1, CXCL2, CXCL3, CXCL5, CXCL6, IL6, IL8, PTGS2, CCL3, CCL4, CCL8, CFB, IL1B, and MMP3. In some embodiments, a composite score is calculated based on the levels of CCL20, CCL22, CSF3(GCSF), CXCL1, CXCL2, CXCL3, CXCL5, CXCL6, IL6, IL8, PTGS2, CCL3, CCL4, CCL8, CFB, IL1B, and MMP3, and wherein the method further comprises comparing the composite score to a reference score.

[0031] In some embodiments, the one or more biomarkers are CCL20, CCL22, CSF3(GCSF), CXCL1, CXCL2, CXCL3, CXCL5, CXCL6, IL6, IL8, and PTGS2. In some embodiments, a composite score is calculated based on the levels of CCL20, CCL22, CSF3, CXCL1, CXCL2, CXCL3, CXCL5, CXCL6, IL6, IL8, and PTGS2, and wherein the method further comprises comparing the composite score to a reference score.

[0032] In other embodiments, the one or more biomarkers are CCL20, CCL3, CCL4, CCL8, CFB, CSF3(GCSF), CXCL1, CXCL2, CXCL3, CXCL5, IL1B, IL6, IL8, MMP3, and PTGS2. In some embodiments, a composite score is calculated based on the levels of CCL20, CCL3, CCL4, CCL8, CFB, CSF3(GCSF), CXCL1, CXCL2, CXCL3, CXCL5, IL1B, IL6, IL8, MMP3, and PTGS2, and wherein the method further comprises comparing the composite score to a reference score.

[0033] In other embodiments, the one or more biomarkers are CCL20, CSF3(GCSF), CXCL1, CXCL2, CXCL3, CXCL5, IL6, IL8, and PTGS2. In some embodiments, a composite score is calculated based on the levels of CCL20, CSF3(GCSF), CXCL1, CXCL2, CXCL3, CXCL5, IL6, IL8, and PTGS2, and wherein the method further comprises comparing the composite score to a reference score.

[0034] In one embodiment, the one or more biomarkers are CSF3 (GCSF), CXCL1 and IL6. In some embodiments a composite score is calculated based on the levels of CSF3 (GCSF), CXCL1 and IL6, and wherein the method further comprises comparing the composite score to a reference score.

[0035] In some embodiments, the levels of the one or more biomarkers are determined by measuring the nucleic acid levels (for example, mRNA) of the one or more biomarkers. In other embodiments, the levels of the one or more biomarkers are determined by measuring the protein levels of the one or more biomarkers.

[0036] In some embodiments, the levels of the one or more biomarkers are the levels of cytokines secreted by the sample selected from a group consisting of GCSF, CXCL1, IL4, IL6, IL8, MDC, IP10, GMCSF, MIP1a and TGFa.

[0037] In some embodiments, the levels of the one or more biomarkers are the levels of cytokines secreted by the sample selected from a group consisting of GCSF, CXCL1, IL4, IL6, IL8, MDC and IP10.

[0038] In some embodiments, the levels of the one or more biomarkers are the levels of cytokines secreted by the sample selected from a group consisting of CXCL1, GCSF, GMCSF, IL6, IL8, MIP1a and TGFa.

[0039] In some embodiments, the levels of the one or more biomarkers are the levels of cytokines secreted by the sample selected from a group consisting of GCSF, CXCL1, IL6 and IL8.

[0040] In some embodiments, the one or more biomarkers comprises GCSF. In some embodiments, the one or more biomarkers comprises CXCL1. In other embodiments, the one or more biomarkers comprises IL4. In other embodiments, the one or more biomarkers comprises IL6. In other embodiments, the one or more biomarkers comprises IL8. In other embodiments, the one or more biomarkers comprises MDC. In other embodiments, the one or more biomarkers comprises IP10. In other embodiments, the one or more biomarkers comprises GMCSF. In other embodiments, the one or more biomarkers comprises MIP1a. In other embodiments, the one or more biomarkers comprises TGFa.

[0041] In one embodiment, the one or more biomarkers comprise CSF3 (GCSF). In another embodiment, the one or more biomarkers comprise CXCL1. In another embodiment, the one or more biomarkers comprise IL6.

[0042] In some embodiments, the one or more biomarkers are GCSF, CXCL1, IL4, IL6, IL8, MDC, IP10, GMCSF, MIP1a and TGFa. In some embodiments, a composite score is calculated based on the levels of GCSF, CXCL1, IL4, IL6, IL8, MDC, IP10, GMCSF, MIP1a and TGFa, and wherein the method further comprises comparing the composite score to a reference score.

[0043] In some embodiments, the one or more biomarkers are GCSF, CXCL1, IL4, IL6, IL8, MDC and IP10. In some embodiments, a composite score is calculated based on the levels of GCSF, CXCL1, IL4, IL6, IL8, MDC and IP10, and wherein the method further comprises comparing the composite score to a reference score.

[0044] In some embodiments, the one or more biomarkers are CXCL1, GCSF, GMCSF, IL6, IL8, MIP1a and TGFa. In some embodiments, a composite score is calculated based on the levels of CXCL1, GCSF, GMCSF, IL6, IL8, MIP1a and TGFa, and wherein the method further comprises comparing the composite score to a reference score.

[0045] In some embodiments, the one or more biomarkers are GCSF, CXCL1, IL6 and IL8. In some embodiments, a composite score is calculated based on the levels of GCSF, CXCL1, IL6 and IL8, and wherein the method further comprises comparing the composite score to a reference score.

[0046] In one embodiment, the one or more biomarkers are CSF3 (GCSF), CXCL1 and IL6. In one embodiment, a composite score is calculated based on the levels of CSF3 (GCSF), CXCL1 and IL6, and wherein the method further comprises comparing the composite score to a reference score.

[0047] In some embodiments, the levels of the one or more biomarkers are determined by measuring the protein levels of the one or more biomarkers.

[0048] In another aspect, provided herein is a method of screening or identifying an agent that is capable of inhibiting IL1α, comprising:
[0049] i. providing a sample from a subject;
[0050] ii. contacting the sample with the agent;
[0051] iii. measuring levels of one or more biomarkers in the sample;
[0052] iv. determining if the agent is capable of inhibiting IL1α based on the levels of the one or more biomarkers as measured in step (iii).

[0053] In some embodiments, the sample comprises a skin cell, wherein optionally the skin cell is an injured skin cell. In some embodiments, the sample is obtained by a skin biopsy procedure. In some embodiments, the size of the sample is about 3.5 mm to 4.5 mm.

[0054] In some embodiments, the method further comprises culturing the sample ex vivo prior to administering the agent to the sample. In other embodiments, the method further comprises culturing the sample ex vivo after administering the agent to the sample. In yet other embodiments, the agent is administered to the sample while culturing the sample ex vivo.

[0055] In some embodiments, the levels of the one or more biomarkers are measured at least 4 hours, at least 5 hours, at least 10 hours, at least 15 hours, at least 20 hours, at least 21 hours, at least 22 hours, at least 23 hours, or at least 24 hours post the administration of the agent and/or post the sample is obtained from the subject. In some embodiments, the level of the one or more biomarkers are measured at about 24 hours post the administration of the agent or post the sample is obtained from the subject.

[0056] In some embodiments, the method further comprises comparing the levels of the one or more biomarkers with reference levels of the one or more biomarkers. In some embodiments, the reference levels of the one or more biomarkers are the levels of the one or more biomarkers in a reference sample from the subject prior to administration of the agent. In other embodiments, the reference levels of the one or more biomarkers are the levels of the one or more biomarkers in a reference sample from the subject without administration of the agent. In yet other embodiments, the reference levels of the one or more biomarkers are pre-determined levels of the one or more biomarkers. In some embodiments, the reference levels of the one or more biomarkers are the levels of the one or more biomarkers in a reference sample administered with a control agent. In some embodiments, the control agent is a positive control agent that inhibits IL1α. In other embodiments, the control agent is a negative control agent that does not inhibit IL1α.

[0057] In some embodiments, the lower levels of the one or more biomarkers as compared with reference levels of the one or more biomarkers indicates the agent is capable of inhibiting IL1α, or wherein the agent is identified as capable of inhibiting IL1α if the levels of the one or more biomarkers in the sample are at least 20%, are at least 30%, at least 35%, at least 40%, or at least 50% less than the reference levels.

[0058] In some embodiments, the levels of the one or more biomarkers are the expression levels of one or more biomarkers selected from a group consisting of GCSF (CSF3), CXCL1, IL6, IL8, IL4, MDC, IP10, GMCSF (CSF2), MIP1a, TGFa, CCL20, CCL22, CXCL2, CXCL3, CXCL5, CXCL6, IL1B, PTGS2, CCL3, CCL4, CCL8, CFB, MMP3, FDCSP, PTX3, CCL3L3, CXCL8, FGF2, NEFM, TNIP3, MMP10, ADORA2A, DEFB4A, GPR84, AC243829.4, COLQ, TFPI2, SPRR2A, OXTR, CCL4L2, MMP1, TNFAIP6, HMX3, LIF, CD274, AC073862.2, TNFRSF11B, AC003092.1, SALL1, AC084871.4, CD38, NFKBIZ, ZC3H12A, SLC4A4, AL139393.3, MSC, SLC1A2, CCL2, GOS2, SLC34A2, AC073611.1, AC106865.1, AL078604.2, INHBA, LCN2, AC009303.4, TDO2, NGF, IER3, BCL2A1, SOD2, CEMIP, SAA1, TRAF1, GCH1, AC007780.1, AC007998.3, TMC1, GRM1, SPINK6, CD1D, IL17C, AC004264.1, EDNRB, DRAM1, CH25H, FOXD4L1, PTGES, SAA2, SLC39A14, RIPK2, PANX2, HS3ST3B1, IL23A, ROR1-AS1, AP002784.1, TMEM132A, ADAMTSS, OSM, RGS3, BMP6, STC1, SIRPA, RFX8, TMEM158, PAX1, IL24, ODAM, BCAT1, AC099494.2, ZNF697, C2CD4A, CCRL2, LAMA1, LSS, TGFB3, TM4SF1, CCL7, FFAR3, QPCTL, GRAMD1A, DNAJB5, ARSG, NRP2, INSM1, ICAM1, REP15, ACSL4, AC073862.5, LYN, AKR1C1, SDK1, THBS2, IL4I1, PILRA, SLC39A8, NEU4, MT1A, NRIP3, C2CD4B, ASPHD1, SLC11A1, SPRR2B, NFKB2, TNFRSF9, and NKX3-1.

[0059] In some embodiments, the levels of the one or more biomarkers are the expression levels of one or more biomarkers selected from a group consisting of GCSF (CSF3), CXCL1, IL6, GMCSF (CSF2), CCL20, CCL22, CXCL2, CXCL3, CXCL5, IL1B, PTGS2, CCL3, CCL4, CCL8, CFB, MMP3, FDCSP, PTX3, CCL3L3, CXCL8, FGF2, NEFM, TNIP3, MMP10, ADORA2A, DEFB4A, GPR84, AC243829.4, COLQ, TFPI2, SPRR2A, OXTR, CCL4L2, MMP1, TNFAIP6, HMX3, LIF, CD274, AC073862.2, TNFRSF11B, AC003092.1, SALL1, AC084871.4, CD38, NFKBIZ, ZC3H12A, SLC4A4, AL139393.3, MSC, SLC1A2, CCL2, GOS2, SLC34A2, AC073611.1, AC106865.1, AL078604.2, INHBA, LCN2, AC009303.4, TDO2, NGF, IER3, BCL2A1, SOD2, CEMIP, SAA1, TRAF1, GCH1, AC007780.1, AC007998.3, TMC1, GRM1, SPINK6, CD1D, IL17C, AC004264.1, EDNRB, DRAM1, CH25H, FOXD4L1, PTGES, SAA2, SLC39A14, RIPK2, PANX2, HS3ST3B1, IL23A, ROR1-AS1, AP002784.1, TMEM132A, ADAMTS5, OSM, RGS3, BMP6, STC1, SIRPA, RFX8, TMEM158, PAX1, IL24, ODAM, BCAT1, AC099494.2, ZNF697, C2CD4A, CCRL2, LAMA1, LSS, TGFB3, TM4SF1, CCL7, FFAR3, QPCTL, GRAMD1A, DNAJB5, ARSG, NRP2, INSM1, ICAM1, REP15, ACSL4, AC073862.5, LYN, AKR1C1, SDK1, THBS2, IL4I1, PILRA, SLC39A8, NEU4, MT1A, NRIP3, C2CD4B, ASPHD1, SLC11A1, SPRR2B, NFKB2, TNFRSF9, and NKX3-1.

[0060] In some embodiments, the levels of the one or more biomarkers are the expression levels of one or more biomarkers selected from a group consisting of CCL20, CCL22, CSF3(GCSF), CXCL1, CXCL2, CXCL3, CXCL5, CXCL6, IL6, IL8, PTGS2, CCL3, CCL4, CCL8, CFB, IL1B, and MMP3.

[0061] In some embodiments, the levels of the one or more biomarkers are the expression levels of one or more biomarkers selected from a group consisting of CCL20, CCL22, CSF3(GCSF), CXCL1, CXCL2, CXCL3, CXCL5, CXCL6, IL6, IL8, and PTGS2. In other embodiments, the levels of the one or more biomarkers are the expression levels of one or more biomarkers selected from a group consisting of CCL20, CCL3, CCL4, CCL8, CFB, CSF3(GCSF), CXCL1, CXCL2, CXCL3, CXCL5, IL1B, IL6, IL8, MMP3, and PTGS2.

[0062] In some embodiments, the one or more biomarkers comprises CCL20. In some embodiments, the one or more biomarkers comprises CCL22. In some embodiments, the one or more biomarkers comprises CSF3. In other embodiments, the one or more biomarkers comprises CXCL1. In other embodiments, the one or more biomarkers comprises CXCL2. In other embodiments, the one or more biomarkers comprises CXCL3. In other embodiments, the one or more biomarkers comprises CXCL5. In other embodiments, the one or more biomarkers comprises CXCL6. In yet other embodiments, the one or more biomarkers comprises IL6. In yet other embodiments, the one or more biomarkers comprises IL8. In yet other embodiments, the one or more biomarkers comprises PTGS2. In yet other embodiments, the one or more biomarkers comprises CCL3. In yet other embodiments, the one or more biomarkers comprises CCL4. In yet other embodiments, the one or more biomarkers comprises CCL8. In yet other embodiments, the one or more biomarkers comprises CFB. In yet other embodiments, the one or more biomarkers comprises IL1B. In yet other embodiments, the one or more biomarkers comprises MMP3.

[0063] In one embodiment, the one or more biomarkers comprise CSF3 (GCSF). In another embodiment, the one ore more biomarkers comprise CXCL1. In another embodiment, the one or more biomarkers comprise IL6.

[0064] In some embodiments, the one or more biomarkers are GCSF (CSF3), CXCL1, IL6, IL8, IL4, MDC, IP10, GMCSF (CSF2), MIP1a, TGFa, CCL20, CCL22, CXCL2, CXCL3, CXCL5, CXCL6, IL1B, PTGS2, CCL3, CCL4, CCL8, CFB, MMP3, FDCSP, PTX3, CCL3L3, CXCL8, FGF2, NEFM, TNIP3, MMP10, ADORA2A, DEFB4A, GPR84, AC243829.4, COLQ, TFPI2, SPRR2A, OXTR, CCL4L2, MMP1, TNFAIP6, HMX3, LIF, CD274, AC073862.2, TNFRSF11B, AC003092.1, SALL1, AC084871.4, CD38, NFKBIZ, ZC3H12A, SLC4A4, AL139393.3, MSC, SLC1A2, CCL2, GOS2, SLC34A2, AC073611.1, AC106865.1, AL078604.2, INHBA, LCN2, AC009303.4, TDO2, NGF, IER3, BCL2A1, SOD2, CEMIP, SAA1, TRAF1, GCH1, AC007780.1, AC007998.3, TMC1, GRM1, SPINK6, CD1D, IL17C, AC004264.1, EDNRB, DRAM1, CH25H, FOXD4L1, PTGES, SAA2, SLC39A14, RIPK2, PANX2, HS3ST3B1, IL23A, ROR1-AS1, AP002784.1, TMEM132A, ADAMTS5, OSM, RGS3, BMP6, STC1, SIRPA, RFX8, TMEM158, PAX1, IL24, ODAM, BCAT1, AC099494.2, ZNF697, C2CD4A, CCRL2, LAMA1, LSS, TGFB3, TM4SF1, CCL7, FFAR3, QPCTL, GRAIVID1A, DNAJB5, ARSG, NRP2, INSM1, ICAM1, REP15, ACSL4, AC073862.5, LYN, AKR1C1, SDK1, THBS2, IL4I1, PILRA, SLC39A8, NEU4, MT1A, NRIP3, C2CD4B, ASPHD1, SLC11A1, SPRR2B, NFKB2, TNFRSF9, and NKX3-1. In some embodiments, a composite score is calculated based on the levels of GCSF (CSF3), CXCL1, IL6, IL8, IL4, MDC, IP10, GMCSF (CSF2), MIP1a, TGFa, CCL20, CCL22, CXCL2, CXCL3, CXCL5, IL1B, PTGS2, CCL3, CCL4, CCL8, CFB, MMP3, FDCSP, PTX3, CCL3L3, CXCL8, FGF2, NEFM, TNIP3, MMP10, ADORA2A, DEFB4A, GPR84, AC243829.4, COLQ, TFPI2, SPRR2A, OXTR, CCL4L2, MMP1, TNFAIP6, HMX3, LIF, CD274, AC073862.2, TNFRSF11B, AC003092.1, SALL1, AC084871.4, CD38, NFKBIZ, ZC3H12A, SLC4A4, AL139393.3, MSC, SLC1A2, CCL2, GOS2, SLC34A2, AC073611.1, AC106865.1, AL078604.2, INHBA, LCN2, AC009303.4, TDO2, NGF, IER3, BCL2A1, SOD2, CEMIP, SAA1, TRAF1, GCH1, AC007780.1, AC007998.3, TMC1, GRM1, SPINK6, CD1D, IL17C, AC004264.1, EDNRB, DRAM1, CH25H, FOXD4L1, PTGES, SAA2, SLC39A14, RIPK2, PANX2, HS3ST3B1, IL23A, ROR1-AS1, AP002784.1, TMEM132A, ADAMTS5, OSM, RGS3, BMP6, STC1, SIRPA, RFX8, TMEM158, PAX1, IL24, ODAM, BCAT1, AC099494.2, ZNF697, C2CD4A, CCRL2, LAMA1, LSS, TGFB3, TM4SF1, CCL7, FFAR3, QPCTL, GRAMD1A, DNAJB5, ARSG, NRP2, INSM1, ICAM1, REP15, ACSL4, AC073862.5, LYN, AKR1C1, SDK1, THBS2, IL4I1, PILRA, SLC39A8, NEU4, MT1A, NRIP3, C2CD4B, ASPHD1, SLC11A1, SPRR2B, NFKB2, TNFRSF9, and NKX3-1, and wherein the method further comprises comparing the composite score to a reference score.

[0065] In some embodiments, the one or more biomarkers are GCSF (CSF3), CXCL1, IL6, GMCSF (CSF2), CCL20, CCL22, CXCL2, CXCL3, CXCL5, IL1B, PTGS2, CCL3, CCL4, CCL8, CFB, MMP3, FDCSP, PTX3, CCL3L3, CXCL8, FGF2, NEFM, TNIP3, MMP10, ADORA2A, DEFB4A, GPR84, AC243829.4, COLQ, TFPI2, SPRR2A, OXTR, CCL4L2, MMP1, TNFAIP6, HMX3, LIF, CD274, AC073862.2, TNFRSF11B, AC003092.1, SALL1, AC084871.4, CD38, NFKBIZ, ZC3H12A, SLC4A4, AL139393.3, MSC, SLC1A2, CCL2, GOS2, SLC34A2, AC073611.1, AC106865.1, AL078604.2, INHBA, LCN2, AC009303.4, TDO2, NGF, IER3, BCL2A1, SOD2, CEMIP, SAA1, TRAF1, GCH1, AC007780.1, AC007998.3, TMC1, GRM1, SPINK6, CD1D, IL17C, AC004264.1, EDNRB, DRAM1, CH25H, FOXD4L1, PTGES, SAA2, SLC39A14, RIPK2, PANX2, HS3ST3B1, IL23A, ROR1-AS1, AP002784.1, TMEM132A, ADAMTS5, OSM, RGS3, BMP6, STC1, SIRPA, RFX8, TMEM158, PAX1, IL24, ODAM, BCAT1, AC099494.2, ZNF697, C2CD4A, CCRL2, LAMA1, LSS, TGFB3, TM4SF1, CCL7, FFAR3, QPCTL, GRAMD1A, DNAJB5, ARSG, NRP2, INSM1, ICAM1, REP15, ACSL4, AC073862.5, LYN, AKR1C1, SDK1, THBS2, IL4I1, PILRA, SLC39A8, NEU4, MT1A, NRIP3, C2CD4B, ASPHD1, SLC11A1, SPRR2B, NFKB2, TNFRSF9, and NKX3-1. In some embodiments, a composite score is calculated based on the levels of GCSF (CSF3), CXCL1, IL6, GMCSF (CSF2), CCL20, CCL22, CXCL2, CXCL3, CXCL5, IL1B, PTGS2, CCL3, CCL4, CCL8, CFB, MMP3, FDCSP, PTX3, CCL3L3, CXCL8, FGF2, NEFM, TNIP3, MMP10, ADORA2A, DEFB4A, GPR84, AC243829.4, COLQ, TFPI2, SPRR2A, OXTR, CCL4L2, MMP1, TNFAIP6, HMX3, LIF, CD274, AC073862.2, TNFRSF11B, AC003092.1, SALL1, AC084871.4, CD38, NFKBIZ, ZC3H12A, SLC4A4, AL139393.3, MSC, SLC1A2, CCL2, GOS2, SLC34A2, AC073611.1, AC106865.1, AL078604.2, INHBA, LCN2, AC009303.4, TDO2, NGF, IER3, BCL2A1, SOD2, CEMIP, SAA1, TRAF1, GCH1, AC007780.1, AC007998.3, TMC1, GRM1, SPINK6, CD1D, IL17C, AC004264.1, EDNRB, DRAM1, CH25H, FOXD4L1, PTGES, SAA2, SLC39A14, RIPK2, PANX2, HS3ST3B1, IL23A, ROR1-AS1, AP002784.1, TMEM132A, ADAMTS5, OSM, RGS3, BMP6, STC1, SIRPA, RFX8, TMEM158, PAX1, IL24, ODAM, BCAT1, AC099494.2, ZNF697, C2CD4A, CCRL2, LAMA1, LSS, TGFB3, TM4SF1, CCL7, FFAR3, QPCTL, GRAMD1A, DNAJB5, ARSG, NRP2, INSM1, ICAM1, REP15, ACSL4, AC073862.5, LYN, AKR1C1, SDK1, THBS2, IL4I1, PILRA, SLC39A8, NEU4, MT1A, NRIP3, C2CD4B, ASPHD1, SLC11A1, SPRR2B, NFKB2, TNFRSF9, and NKX3-1, and wherein the method further comprises comparing the composite score to a reference score.

[0066] In some embodiments, the one or more biomarkers are CCL20, CCL22, CSF3(GCSF), CXCL1, CXCL2, CXCL3, CXCL5, CXCL6, IL6, IL8, PTGS2, CCL3, CCL4, CCL8, CFB, IL1B, and MMP3. In some embodiments, a composite score is calculated based on the levels of CCL20, CCL22, CSF3(GCSF), CXCL1, CXCL2, CXCL3, CXCL5, CXCL6, IL6, IL8, PTGS2, CCL3, CCL4, CCL8, CFB, IL1B, and MMP3, and wherein the method further comprises comparing the composite score to a reference score.

[0067] In some embodiments, the one or more biomarkers are CCL20, CCL22, CSF3(GCSF), CXCL1, CXCL2, CXCL3, CXCL5, CXCL6, IL6, IL8, and PTGS2. In some embodiments, a composite score is calculated based on the levels of CCL20, CCL22, CSF3, CXCL1, CXCL2, CXCL3, CXCL5, CXCL6, IL6, IL8, and PTGS2, and wherein the method further comprises comparing the composite score to a reference score.

[0068] In other embodiments, the one or more biomarkers are CCL20, CCL3, CCL4, CCL8, CFB, CSF3(GCSF), CXCL1, CXCL2, CXCL3, CXCL5, IL1B, IL6, IL8, MMP3, and PTGS2. In some embodiments, a composite score is calculated based on the levels of CCL20, CCL3, CCL4, CCL8, CFB, CSF3(GCSF), CXCL1, CXCL2, CXCL3, CXCL5, IL1B, IL6, IL8, MMP3, and PTGS2, and wherein the method further comprises comparing the composite score to a reference score.

[0069] In other embodiments, the one or more biomarkers are CCL20, CSF3(GCSF), CXCL1, CXCL2, CXCL3, CXCL5, IL6, IL8, and PTGS2. In some embodiments, a composite score is calculated based on the levels of CCL20, CSF3(GCSF), CXCL1, CXCL2, CXCL3, CXCL5, IL6, IL8, and PTGS2, and wherein the method further comprises comparing the composite score to a reference score.

[0070] In one embodiment, the one or more biomarkers are CSF3 (GCSF), CXCL1 and IL6. In some embodiments a composite score is calculated based on the levels of CSF3 (GCSF), CXCL1 and IL6, and wherein the method further comprises comparing the composite score to a reference score.

[0071] In some embodiments, the levels of the one or more biomarkers are determined by measuring the nucleic acid levels (for example, RNA) of the one or more biomarkers. In other embodiments, the levels of the one or more biomarkers are determined by measuring the protein levels of the one or more biomarkers.

[0072] In some embodiments, the levels of the one or more biomarkers are the levels of cytokines secreted by the sample selected from a group consisting of GCSF, CXCL1, IL4, IL6, IL8, MDC, IP10, GMCSF, MIP1a and TGFa.

[0073] In some embodiments, the levels of the one or more biomarkers are the levels of cytokines secreted by the sample selected from a group consisting of GCSF, CXCL1, IL4, IL6, IL8, MDC and IP10.

[0074] In some embodiments, the levels of the one or more biomarkers are the levels of cytokines secreted by the sample selected from a group consisting of CXCL1, GCSF, GMCSF, IL6, IL8, MIP1a and TGFa.

[0075] In some embodiments, the levels of the one or more biomarkers are the levels of cytokines secreted by the sample selected from a group consisting of GCSF, CXCL1, IL6 and IL8.

[0076] In some embodiments, the one or more biomarkers comprises GCSF. In some embodiments, the one or more biomarkers comprises CXCL1. In other embodiments, the one or more biomarkers comprises IL4. In other embodiments, the one or more biomarkers comprises IL6. In other embodiments, the one or more biomarkers comprises IL8. In other embodiments, the one or more biomarkers comprises MDC. In other embodiments, the one or more biomarkers comprises IP10. In other embodiments, the one or more biomarkers comprises GMCSF. In other embodiments, the one or more biomarkers comprises MIP1a. In other embodiments, the one or more biomarkers comprises TGFa.

[0077] In some embodiments, the one or more biomarkers are GCSF, CXCL1, IL4, IL6, IL8, MDC, IP10, GMCSF, MIP1a and TGFa. In some embodiments, a composite score is calculated based on the levels of GCSF, CXCL1, IL4, IL6, IL8, MDC, IP10, GMCSF, MIP1a and TGFa, and wherein the method further comprises comparing the composite score to a reference score.

[0078] In some embodiments, the one or more biomarkers are GCSF, CXCL1, IL4, IL6, IL8, MDC and IP10. In some embodiments, a composite score is calculated based on the levels of GCSF, CXCL1, IL4, IL6, IL8, MDC and IP10, and wherein the method further comprises comparing the composite score to a reference score.

[0079] In some embodiments, the one or more biomarkers are CXCL1, GCSF, GMCSF, IL6, IL8, MIP1a and TGFa. In some embodiments, a composite score is calculated based on the levels of CXCL1, GCSF, GMCSF, IL6, IL8, MIP1a and TGFa, and wherein the method further comprises comparing the composite score to a reference score.

[0080] In some embodiments, the one or more biomarkers are GCSF, CXCL1, IL6 and IL8. In some embodiments, a composite score is calculated based on the levels of GCSF, CXCL1, IL6 and IL8, and wherein the method further comprises comparing the composite score to a reference score.

[0081] In one embodiment, the one or more biomarkers are CSF3 (GCSF), CXCL1 and IL6. In some embodiments a composite score is calculated based on the levels of CSF3 (GCSF), CXCL1 and IL6, and wherein the method further comprises comparing the composite score to a reference score.

[0082] In some embodiments, the levels of the one or more biomarkers are determined by measuring the protein levels of the one or more biomarkers.

[0083] In yet another aspect, provided herein is a method of determining a pharmacodynamics or pharmacokinetic effect of an inhibitor of IL1α comprising:
[0084] i. obtaining a first sample from a subject;
[0085] ii. administering the inhibitor of IL1α to the subject;
[0086] iii. obtaining a second sample from the subject;
[0087] iv. measuring the levels of the one or more biomarkers in the first sample and the second sample, and
[0088] v. determing that the inhibitor of IL1α is effective if the levels of the one or more biomarkers in the second sample are lower than the levels of the one or more biomarkers in the first sample.

[0089] In yet another aspect, provided herein is a method of monitoring the response of a subject having an IL1α mediated disease to an IL1α inhibitor comprising:
[0090] i. obtaining a first sample from a subject;
[0091] ii. administering an IL1α inhibitor to the subject;
[0092] iii. obtaining a second sample from the subject;
[0093] iv. measuring levels of one or more biomarkers in the first sample and the second sample; and
[0094] v. determining that the treatment or the predefined dose is effective when the levels of the one or more biomarkers in the second sample are lower than the levels of one or more biomarkers in the first sample.

[0095] In some embodiments, the second sample is obtained from the subject at 1.5 to 2.5 hours post the administration of the IL1α inhibitor to the subject. In other embodiments, the second sample is obtained from the subject at about 2 hours post the administration of the IL1α inhibitor to the subject.

[0096] In some embodiments, the first sample and the second sample comprise a skin cell. In some embodiments, the first sample and the second sample comprise an injured skin cell. In some embodiments, the first sample and the second sample are obtained by a skin biopsy procedure. In some embodiments, the size of the first sample and the second sample is about 3.5 mm to 4.5 mm.

[0097] In some embodiments, the levels of the one or more biomarkers are the expression levels of one or more biomarkers selected from a group consisting of GCSF (CSF3), CXCL1, IL6, IL8, IL4, MDC, IP10, GMCSF (CSF2), MIP1a, TGFa, CCL20, CCL22, CXCL2, CXCL3, CXCLS, CXCL6, IL1B, PTGS2, CCL3, CCL4, CCL8, CFB, MMP3, FDCSP, PTX3, CCL3L3, CXCL8, FGF2, NEFM, TNIP3, MMP10, ADORA2A, DEFB4A, GPR84, AC243829.4, COLQ, TFPI2, SPRR2A, OXTR, CCL4L2, MMP1, TNFAIP6, HMX3, LIF, CD274, AC073862.2, TNFRSF11B, AC003092.1, SALL1, AC084871.4, CD38, NFKBIZ, ZC3H12A, SLC4A4, AL139393.3, MSC, SLC1A2, CCL2, GOS2, SLC34A2, AC073611.1, AC106865.1, AL078604.2, INHBA, LCN2, AC009303.4, TDO2, NGF, IER3, BCL2A1, SOD2, CEMIP, SAA1, TRAF1, GCH1, AC007780.1, AC007998.3, TMC1, GRM1, SPINK6, CD1D, IL17C, AC004264.1, EDNRB, DRAM1, CH25H, FOXD4L1, PTGES, SAA2, SLC39A14, RIPK2, PANX2, HS3ST3B1, IL23A, ROR1-AS1, AP002784.1, TMEM132A, ADAMTS5, OSM, RGS3, BMP6, STC1, SIRPA, RFX8, TMEM158, PAX1, IL24, ODAM, BCAT1, AC099494.2, ZNF697, C2CD4A, CCRL2, LAMA1, LSS, TGFB3, TM4SF1, CCL7, FFAR3, QPCTL, GRAMD1A, DNAJB5, ARSG, NRP2, INSM1, ICAM1, REP15, ACSL4, AC073862.5, LYN, AKR1C1, SDK1, THBS2, IL4I1, PILRA, SLC39A8, NEU4, MT1A, NRIP3, C2CD4B, ASPHD1, SLC11A1, SPRR2B, NFKB2, TNFRSF9, and NKX3-1.

[0098] In some embodiments, the levels of the one or more biomarkers are the expression levels of one or more biomarkers selected from a group consisting of GCSF (CSF3), CXCL1, IL6, GMCSF (CSF2), CCL20, CCL22, CXCL2, CXCL3, CXCL5, IL1B, PTGS2, CCL3, CCL4, CCL8, CFB, MMP3, FDCSP, PTX3, CCL3L3, CXCL8, FGF2, NEFM, TNIP3, MMP10, ADORA2A, DEFB4A, GPR84, AC243829.4, COLQ, TFPI2, SPRR2A, OXTR, CCL4L2, MMP1, TNFAIP6, HMX3, LIF, CD274, AC073862.2, TNFRSF11B, AC003092.1, SALL1, AC084871.4, CD38, NFKBIZ, ZC3H12A, SLC4A4, AL139393.3, MSC, SLC1A2, CCL2, GOS2, SLC34A2, AC073611.1, AC106865.1, AL078604.2, INHBA, LCN2, AC009303.4, TDO2, NGF, IER3, BCL2A1, SOD2, CEMIP, SAA1, TRAF1, GCH1, AC007780.1, AC007998.3, TMC1, GRM1, SPINK6, CD1D, IL17C, AC004264.1, EDNRB, DRAM1, CH25H, FOXD4L1, PTGES, SAA2, SLC39A14, RIPK2, PANX2, HS3ST3B1, IL23A, ROR1-AS1, AP002784.1, TMEM132A, ADAMTS5, OSM, RGS3, BMP6, STC1, SIRPA, RFX8, TMEM158, PAX1, IL24, ODAM, BCAT1, AC099494.2, ZNF697, C2CD4A, CCRL2, LAMA1, LSS, TGFB3, TM4SF1, CCL7, FFAR3, QPCTL, GRAMD1A, DNAJB5, ARSG, NRP2, INSM1, ICAM1, REP15, ACSL4, AC073862.5, LYN, AKR1C1, SDK1, THBS2, IL4I1, PILRA, SLC39A8, NEU4, MT1A, NRIP3, C2CD4B, ASPHD1, SLC11A1, SPRR2B, NFKB2, TNFRSF9, and NKX3-1.

[0099] In some embodiments, the levels of the one or more biomarkers are the expression levels of one or more biomarkers selected from a group consisting of CCL20, CCL22, CSF3(GCSF), CXCL1, CXCL2, CXCL3, CXCL5, CXCL6, IL6, IL8, PTGS2, CCL3, CCL4, CCL8, CFB, IL1B, and MMP3.

[0100] In some embodiments, the levels of the one or more biomarkers are the expression levels of one or more biomarkers selected from a group consisting of CCL20, CCL22, CSF3(GCSF), CXCL1, CXCL2, CXCL3, CXCL5, CXCL6, IL6, IL8, and PTGS2. In other embodiments, the levels of the one or more biomarkers are the expression levels of one or more biomarkers selected from a group consisting of CCL20, CCL3, CCL4, CCL8, CFB, CSF3(GCSF), CXCL1, CXCL2, CXCL3, CXCL5, IL1B, IL6, IL8, MMP3, and PTGS2.

[0101] In some embodiments, the one or more biomarkers comprises CCL20. In some embodiments, the one or more biomarkers comprises CCL22. In some embodiments, the one or more biomarkers comprises CSF3. In other embodiments, the one or more biomarkers comprises CXCL1. In other embodiments, the one or more biomarkers comprises CXCL2. In other embodiments, the one or more biomarkers comprises CXCL3. In other embodiments, the one or more biomarkers comprises CXCL5. In other embodiments, the one or more biomarkers comprises CXCL6. In yet other embodiments, the one or more biomarkers comprises IL6. In yet other embodiments, the one or more biomarkers comprises IL8. In yet other embodiments, the one or more biomarkers comprises PTGS2. In yet other embodiments, the one or more biomarkers comprises CCL3. In yet other embodiments, the one or more biomarkers comprises CCL4. In yet other embodiments, the one or more biomarkers comprises CCL8. In yet other embodiments, the one or more biomarkers comprises CFB. In yet other embodiments, the one or more biomarkers comprises IL1B. In yet other embodiments, the one or more biomarkers comprises MMP3.

[0102] In one embodiment, the one or more biomarkers comprise CSF3 (GCSF). In another embodiment, the one ore more biomarkers comprise CXCL1. In another embodiment, the one or more biomarkers comprise IL6.

[0103] In some embodiments, the one or more biomarkers are GCSF (CSF3), CXCL1, IL6, IL8, IL4, MDC, IP10, GMCSF (CSF2), MIP1a, TGFa, CCL20, CCL22, CXCL2, CXCL3, CXCL5, CXCL6, IL1B, PTGS2, CCL3, CCL4, CCL8, CFB, MMP3, FDCSP, PTX3, CCL3L3, CXCL8, FGF2, NEFM, TNIP3, MMP10, ADORA2A, DEFB4A, GPR84, AC243829.4, COLQ, TFPI2, SPRR2A, OXTR, CCL4L2, MMP1, TNFAIP6, HMX3, LIF, CD274, AC073862.2, TNFRSF11B, AC003092.1, SALL1, AC084871.4, CD38, NFKBIZ, ZC3H12A, SLC4A4, AL139393.3, MSC, SLC1A2, CCL2, GOS2, SLC34A2, AC073611.1, AC106865.1, AL078604.2, INHBA, LCN2, AC009303.4, TDO2, NGF, IER3, BCL2A1, SOD2, CEMIP, SAA1, TRAF1, GCH1, AC007780.1, AC007998.3, TMC1, GRM1, SPINK6, CD1D, IL17C, AC004264.1, EDNRB, DRAM1, CH25H, FOXD4L1, PTGES, SAA2, SLC39A14, RIPK2, PANX2, HS3ST3B1, IL23A, ROR1-AS1, AP002784.1, TMEM132A, ADAMTS5, OSM, RGS3, BMP6, STC1, SIRPA, RFX8, TMEM158, PAX1, IL24, ODAM, BCAT1, AC099494.2, ZNF697, C2CD4A, CCRL2, LAMA1, LSS, TGFB3, TM4SF1, CCL7, FFAR3, QPCTL, GRAMD1A, DNAJB5, ARSG, NRP2, INSM1, ICAM1, REP15, ACSL4, AC073862.5, LYN, AKR1C1, SDK1, THBS2, IL4I1, PILRA, SLC39A8, NEU4, MT1A, NRIP3, C2CD4B, ASPHD1, SLC11A1, SPRR2B, NFKB2, TNFRSF9, and NKX3-1. In some embodiments, a composite score is calculated based on the levels of GCSF (CSF3), CXCL1, IL6, IL8, IL4, MDC, IP10, GMCSF (CSF2), MIP1a, TGFa, CCL20, CCL22, CXCL2, CXCL3, CXCL5, IL1B, PTGS2, CCL3, CCL4, CCL8, CFB, MMP3, FDCSP, PTX3, CCL3L3, CXCL8, FGF2, NEFM, TNIP3, MMP10, ADORA2A, DEFB4A, GPR84, AC243829.4, COLQ, TFPI2, SPRR2A, OXTR, CCL4L2, MMP1, TNFAIP6, HMX3, LIF, CD274, AC073862.2, TNFRSF11B, AC003092.1, SALL1, AC084871.4, CD38, NFKBIZ, ZC3H12A, SLC4A4, AL139393.3, MSC, SLC1A2, CCL2, GOS2, SLC34A2, AC073611.1, AC106865.1, AL078604.2, INHBA, LCN2, AC009303.4, TDO2, NGF, IER3, BCL2A1, SOD2, CEMIP, SAA1, TRAF1, GCH1, AC007780.1, AC007998.3, TMC1, GRM1, SPINK6, CD1D, IL17C, AC004264.1, EDNRB, DRAM1, CH25H, FOXD4L1, PTGES, SAA2, SLC39A14, RIPK2, PANX2, HS3ST3B1, IL23A, ROR1-AS1, AP002784.1, TMEM132A, ADAMTS5, OSM, RGS3, BMP6, STC1, SIRPA, RFX8, TMEM158, PAX1, IL24, ODAM, BCAT1, AC099494.2, ZNF697, C2CD4A, CCRL2, LAMA1, LSS, TGFB3, TM4SF1, CCL7, FFAR3, QPCTL, GRAMD1A, DNAJB5, ARSG, NRP2, INSM1, ICAM1, REP15, ACSL4, AC073862.5, LYN, AKR1C1, SDK1, THBS2, IL411, PILRA, SLC39A8, NEU4, MT1A, NRIP3, C2CD4B, ASPHD1, SLC11A1, SPRR2B, NFKB2, TNFRSF9, and NKX3-1, and wherein the method further comprises comparing the composite score to a reference score.

[0104] In some embodiments, the one or more biomarkers are GCSF (CSF3), CXCL1, IL6, GMCSF (CSF2), CCL20, CCL22, CXCL2, CXCL3, CXCL5, IL1B, PTGS2, CCL3, CCL4, CCL8, CFB, MMP3, FDCSP, PTX3, CCL3L3, CXCL8, FGF2, NEFM, TNIP3, MMP10, ADORA2A, DEFB4A, GPR84, AC243829.4, COLQ, TFPI2, SPRR2A, OXTR, CCL4L2, MMP1, TNFAIP6, HMX3, LIF, CD274, AC073862.2, TNFRSF11B, AC003092.1, SALL1, AC084871.4, CD38, NFKBIZ, ZC3H12A, SLC4A4, AL139393.3, MSC, SLC1A2, CCL2, G0S2, SLC34A2, AC073611.1, AC106865.1, AL078604.2, INHBA, LCN2, AC009303.4, TDO2, NGF, IER3, BCL2A1, SOD2, CEMIP, SAA1, TRAF1, GCH1, AC007780.1, AC007998.3, TMC1, GRM1, SPINK6, CD1D, IL17C, AC004264.1, EDNRB, DRAM1, CH25H, FOXD4L1, PTGES, SAA2, SLC39A14, RIPK2, PANX2, HS3ST3B1, IL23A, ROR1-AS1, AP002784.1, TMEM132A, ADAMTS5, OSM, RGS3, BMP6, STC1, SIRPA, RFX8, TMEM158, PAX1, IL24, ODAM, BCAT1, AC099494.2, ZNF697, C2CD4A, CCRL2, LAMA1, LSS, TGFB3, TM4SF1, CCL7, FFAR3, QPCTL, GRAMD1A, DNAJB5, ARSG, NRP2, INSM1, ICAM1, REP15, ACSL4, AC073862.5, LYN, AKR1C1, SDK1, THBS2, IL4I1, PILRA, SLC39A8, NEU4, MT1A, NRIP3, C2CD4B, ASPHD1, SLC11A1, SPRR2B, NFKB2, TNFRSF9, and NKX3-1. In some embodiments, a composite score is calculated based on the levels of GCSF (CSF3), CXCL1, IL6, GMCSF (CSF2), CCL20, CCL22, CXCL2, CXCL3, CXCL5, IL1B, PTGS2, CCL3, CCL4, CCL8, CFB, MMP3, FDCSP, PTX3, CCL3L3, CXCL8, FGF2, NEFM, TNIP3, MMP10, ADORA2A, DEFB4A, GPR84, AC243829.4, COLQ, TFPI2, SPRR2A, OXTR, CCL4L2, MMP1, TNFAIP6, HMX3, LIF, CD274, AC073862.2, TNFRSF11B, AC003092.1, SALL1, AC084871.4, CD38, NFKBIZ, ZC3H12A, SLC4A4, AL139393.3, MSC, SLC1A2, CCL2, GOS2, SLC34A2, AC073611.1, AC106865.1, AL078604.2, INHBA, LCN2, AC009303.4, TDO2, NGF, IER3, BCL2A1, SOD2, CEMIP, SAA1, TRAF1, GCH1, AC007780.1, AC007998.3, TMC1, GRM1, SPINK6, CD1D, IL17C, AC004264.1, EDNRB, DRAM1, CH25H, FOXD4L1, PTGES, SAA2, SLC39A14, RIPK2, PANX2, HS3ST3B1, IL23A, ROR1-AS1, AP002784.1, TMEM132A, ADAMTS5, OSM, RGS3, BMP6, STC1, SIRPA, RFX8, TMEM158, PAX1, IL24, ODAM, BCAT1, AC099494.2, ZNF697, C2CD4A, CCRL2, LAMA1, LSS, TGFB3, TM4SF1, CCL7, FFAR3, QPCTL, GRAMD1A, DNAJB5, ARSG, NRP2, INSM1, ICAM1, REP15, ACSL4, AC073862.5, LYN, AKR1C1, SDK1, THBS2, IL4I1, PILRA, SLC39A8, NEU4, MT1A, NRIP3, C2CD4B, ASPHD1, SLC11A1, SPRR2B, NFKB2, TNFRSF9, and NKX3-1, and wherein the method further comprises comparing the composite score to a reference score.

[0105] In some embodiments, the one or more biomarkers are CCL20, CCL22, CSF3(GCSF), CXCL1, CXCL2, CXCL3, CXCL5, CXCL6, IL6, IL8, PTGS2, CCL3, CCL4, CCL8, CFB, IL1B, and MMP3. In some embodiments, a composite score is calculated based on the levels of CCL20, CCL22, CSF3(GCSF), CXCL1, CXCL2, CXCL3, CXCL5, CXCL6, IL6, IL8, PTGS2, CCL3, CCL4, CCL8, CFB, IL1B, and MMP3, and wherein the method further comprises comparing the composite score to a reference score

[0106] In some embodiments, the one or more biomarkers are CCL20, CCL22, CSF3(GCSF), CXCL1, CXCL2, CXCL3, CXCL5, CXCL6, IL6, IL8, and PTGS2. In some embodiments, a composite score is calculated based on the levels of CCL20, CCL22, CSF3, CXCL1, CXCL2, CXCL3, CXCL5, CXCL6, IL6, IL8, and PTGS2, and wherein the method further comprises comparing the composite score to a reference score.

[0107] In other embodiments, the one or more biomarkers are CCL20, CCL3, CCL4, CCL8, CFB, CSF3(GCSF), CXCL1, CXCL2, CXCL3, CXCL5, IL1B, IL6, IL8, MMP3, and PTGS2. In some embodiments, a composite score is calculated based on the levels of CCL20, CCL3, CCL4, CCL8, CFB, CSF3(GCSF), CXCL1, CXCL2, CXCL3, CXCL5, IL1B, IL6, IL8, MMP3, and PTGS2, and wherein the method further comprises comparing the composite score to a reference score.

[0108] In other embodiments, the one or more biomarkers are CCL20, CSF3(GCSF), CXCL1, CXCL2, CXCL3, CXCL5, IL6, IL8, and PTGS2. In some embodiments, a composite score is calculated based on the levels of CCL20, CSF3(GCSF), CXCL1, CXCL2, CXCL3, CXCL5, IL6, IL8, and PTGS2, and wherein the method further comprises comparing the composite score to a reference score.

[0109] In one embodiment, the one or more biomarkers are CSF3 (GCSF), CXCL1 and IL6. In some embodiments a composite score is calculated based on the levels of CSF3 (GCSF), CXCL1 and IL6, and wherein the method further comprises comparing the composite score to a reference score.

[0110] In some embodiments, the levels of the one or more biomarkers are determined by measuring the nucleic acid levels (for example, RNA) of the one or more biomarkers. In other embodiments, the levels of the one or more biomarkers are determined by measuring the protein levels of the one or more biomarkers.

[0111] In some embodiments, the levels of the one or more biomarkers are the levels of cytokines secreted by the sample selected from a group consisting of GCSF, CXCL1, IL4, IL6, IL8, MDC, IP10, GMCSF, MIP1a and TGFa.

[0112] In some embodiments, the levels of the one or more biomarkers are the levels of cytokines secreted by the sample selected from a group consisting of GCSF, CXCL1, IL4, IL6, IL8, MDC and IP10.

[0113] In some embodiments, the levels of the one or more biomarkers are the levels of cytokines secreted by the sample selected from a group consisting of CXCL1, GCSF, GMCSF, IL6, IL8, MIP1a and TGFa.

[0114] In some embodiments, the levels of the one or more biomarkers are the levels of cytokines secreted by the sample selected from a group consisting of GCSF, CXCL1, IL6 and IL8.

[0115] In some embodiments, the one or more biomarkers comprises GCSF. In some embodiments, the one or more biomarkers comprises CXCL1. In other embodiments, the one or more biomarkers comprises IL4. In other embodiments, the one or more biomarkers comprises IL6. In other embodiments, the one or more biomarkers comprises IL8. In other embodiments, the one or more biomarkers comprises MDC. In other embodiments, the one or more biomarkers comprises IP10. In other embodiments, the one or more biomarkers comprises GMCSF. In other embodiments, the one or more biomarkers comprises MIP1a. In other embodiments, the one or more biomarkers comprises TGFa.

[0116] In some embodiments, the one or more biomarkers are GCSF, CXCL1, IL4, IL6, IL8, MDC, IP10, GMCSF, MIP1a and TGFa. In some embodiments, a composite score is calculated based on the levels of GCSF, CXCL1, IL4, IL6, IL8, MDC, IP10, GMCSF, MIP1a and TGFa, and wherein the method further comprises comparing the composite score to a reference score.

[0117] In some embodiments, the one or more biomarkers are GCSF, CXCL1, IL4, IL6, IL8, MDC and IP10. In some embodiments, a composite score is calculated based on the levels of GCSF, CXCL1, IL4, IL6, IL8, MDC and IP10, and wherein the method further comprises comparing the composite score to a reference score.

[0118] In some embodiments, the one or more biomarkers are CXCL1, GCSF, GMCSF, IL6, IL8, MIP1a and TGFa. In some embodiments, a composite score is calculated based on the levels of CXCL1, GCSF, GMCSF, IL6, IL8, MIP1a and TGFa, and wherein the method further comprises comparing the composite score to a reference score.

[0119] In some embodiments, the one or more biomarkers are GCSF, CXCL1, IL6 and IL8. In some embodiments, a composite score is calculated based on the levels of GCSF, CXCL1, IL6 and IL8, and wherein the method further comprises comparing the composite score to a reference score.

[0120] In one embodiment, the one or more biomarkers are CSF3 (GCSF), CXCL1 and IL6. In some embodiments a composite score is calculated based on the levels of CSF3 (GCSF), CXCL1 and IL6, and wherein the method further comprises comparing the composite score to a reference score.

[0121] In some embodiments, the levels of the one or more biomarkers are determined by measuring the protein levels of the one or more biomarkers.

[0122] In yet another aspect, provided herein is a kit for determining or monitoring a pharmacodynamics or pharmacokinetic effect of an inhibitor of IL1α comprising: (a) an agent for measuring levels of one or more biomarkers in a sample, wherein the one or more biomarkers are selected from (i) a group consisting of CCL20, CCL22, CSF3(GCSF), CXCL1, CXCL2, CXCL3, CXCL5, CXCL6, IL6, IL8, PTGS2, CCL3, CCL4, CCL8, CFB, IL1B, and MMP3, or (ii) a group consisting of GCSF, CXCL1, IL4, IL6, IL8, MDC, IP10, GMCSF, MIP1a and TGFa, or (iii) a group consisting of GCSF (CSF3), CXCL1, IL6, IL8, IL4, MDC, IP10, GMCSF (CSF2), MIP1a, TGFa, CCL20, CCL22, CXCL2, CXCL3, CXCL5, CXCL6, IL1B, PTGS2, CCL3, CCL4, CCL8, CFB, MMP3, FDCSP, PTX3, CCL3L3, CXCL8, FGF2, NEFM, TNIP3, MMP10, ADORA2A, DEFB4A, GPR84, AC243829.4, COLQ, TFPI2, SPRR2A, OXTR, CCL4L2, MMP1, TNFAIP6, HMX3, LIF, CD274, AC073862.2, TNFRSF11B, AC003092.1, SALL1, AC084871.4, CD38, NFKBIZ, ZC3H12A, SLC4A4, AL139393.3, MSC, SLC1A2, CCL2, GOS2, SLC34A2, AC073611.1, AC106865.1, AL078604.2, INHBA, LCN2, AC009303.4, TDO2, NGF, IER3, BCL2A1, SOD2, CEMIP, SAA1, TRAF1, GCH1, AC007780.1, AC007998.3, TMC1, GRM1, SPINK6, CD1D, IL17C, AC004264.1, EDNRB, DRAM1, CH25H, FOXD4L1, PTGES, SAA2, SLC39A14, RIPK2, PANX2, HS3ST3B1, IL23A, ROR1-AS1, AP002784.1, TMEM132A, ADAMTS5, OSM, RGS3, BMP6, STC1, SIRPA, RFX8, TMEM158, PAX1, IL24, ODAM, BCAT1, AC099494.2, ZNF697, C2CD4A, CCRL2, LAMA1, LSS, TGFB3, TM4SF1, CCL7, FFAR3, QPCTL, GRAIVID1A, DNAJB5, ARSG, NRP2, INSM1, ICAM1, REP15, ACSL4, AC073862.5, LYN, AKR1C1, SDK1, THBS2, IL4I1, PILRA, SLC39A8, NEU4, MT1A, NRIP3, C2CD4B, ASPHD1, SLC11A1, SPRR2B, NFKB2, TNFRSF9, and NKX3-1 and (b) a positive control agent that inhibits IL1α and/or a negative control agent that does not inhibit IL1α.

[0123] In some embodiments of the kit, the one or more biomarkers comprise CSF3 (GCSF), CXCL1 and IL6.

[0124] In some embodiments of the kit, the one or more biomarkers are GCSF, CXCL1, IL6 and IL8.

[0125] In some embodiments of the kit, the one or more biomarkers are CXCL1, GCSF, GMCSF, IL6, IL8, MIP1a and TGFa.

[0126] In some embodiments of the kit, the one or more biomarkers are GCSF, CXCL1, IL4, IL6, IL8, MDC and IP10.

[0127] In some embodiments of the kit, the one or more biomarkers are GCSF, CXCL1, IL4, IL6, IL8, MDC, IP10, GMCSF, MIP1a and TGFa.

[0128] In other embodiments of the kit, the one or more biomarkers are CCL20, CSF3(GCSF), CXCL1, CXCL2, CXCL3, CXCL5, IL6, IL8, and PTGS2.

[0129] In other embodiments of the kit, the one or more biomarkers are CCL20, CCL3, CCL4, CCL8, CFB, CSF3(GCSF), CXCL1, CXCL2, CXCL3, CXCL5, IL1B, IL6, IL8, MMP3, and PTGS2.

[0130] In some embodiments of the kit, the one or more biomarkers are CCL20, CCL22, CSF3(GCSF), CXCL1, CXCL2, CXCL3, CXCL5, CXCL6, IL6, IL8, and PTGS2.

[0131] In some embodiments of the kit, the one or more biomarkers are CCL20, CCL22, CSF3(GCSF), CXCL1, CXCL2, CXCL3, CXCL5, CXCL6, IL6, IL8, PTGS2, CCL3, CCL4, CCL8, CFB, IL1B, and MMP3.

[0132] In some embodiments of the kit, the one or more biomarkers are GCSF (CSF3), CXCL1, IL6, GMCSF (CSF2), CCL20, CCL22, CXCL2, CXCL3, CXCL5, IL1B, PTGS2, CCL3, CCL4, CCL8, CFB, MMP3, FDCSP, PTX3, CCL3L3, CXCL8, FGF2, NEFM, TNIP3, MMP10, ADORA2A, DEFB4A, GPR84, AC243829.4, COLQ, TFPI2, SPRR2A, OXTR, CCL4L2, MMP1, TNFAIP6, HMX3, LIF, CD274, AC073862.2, TNFRSF11B, AC003092.1, SALL1, AC084871.4, CD38, NFKBIZ, ZC3H12A, SLC4A4, AL139393.3, MSC, SLC1A2, CCL2, G0S2, SLC34A2, AC073611.1, AC106865.1, AL078604.2, INHBA, LCN2, AC009303.4, TDO2, NGF, IER3, BCL2A1, SOD2, CEMIP, SAA1, TRAF1, GCH1, AC007780.1, AC007998.3, TMC1, GRM1, SPINK6, CD1D, IL17C, AC004264.1, EDNRB, DRAM1, CH25H, FOXD4L1, PTGES, SAA2, SLC39A14, RIPK2, PANX2, HS3ST3B1, IL23A, ROR1-AS1, AP002784.1, TMEM132A, ADAMTS5, OSM, RGS3, BMP6, STC1, SIRPA, RFX8, TMEM158, PAX1, IL24, ODAM, BCAT1, AC099494.2, ZNF697, C2CD4A, CCRL2, LAMA1, LSS, TGFB3, TM4SF1, CCL7, FFAR3, QPCTL, GRAIVID1A, DNAJB5, ARSG, NRP2, INSM1, ICAM1, REP15, ACSL4, AC073862.5, LYN, AKR1C1, SDK1, THBS2, IL4I1, PILRA, SLC39A8, NEU4, MT1A, NRIP3, C2CD4B, ASPHD1, SLC11A1, SPRR2B, NFKB2, TNFRSF9, and NKX3-1.

[0133] In one embodiment of the kit, the one or more biomarkers are GCSF (CSF3), CXCL1, IL6, IL8, IL4, MDC, IP10, GMCSF (CSF2), MIP1a, TGFa, CCL20, CCL22, CXCL2, CXCL3, CXCL5, CXCL6, IL1B, PTGS2, CCL3, CCL4, CCL8, CFB, MMP3, FDCSP, PTX3, CCL3L3, CXCL8, FGF2, NEFM, TNIP3, MMP10, ADORA2A, DEFB4A, GPR84, AC243829.4, COLQ, TFPI2, SPRR2A, OXTR, CCL4L2, MMP1, TNFAIP6, HMX3, LIF, CD274, AC073862.2, TNFRSF11B, AC003092.1, SALL1, AC084871.4, CD38, NFKBIZ, ZC3H12A, SLC4A4, AL139393.3, MSC, SLC1A2, CCL2, GOS2, SLC34A2, AC073611.1, AC106865.1, AL078604.2, INHBA, LCN2, AC009303.4, TDO2, NGF, IER3, BCL2A1, SOD2, CEMIP, SAA1, TRAF1, GCH1, AC007780.1, AC007998.3, TMC1, GRM1, SPINK6, CD1D, IL17C, AC004264.1, EDNRB, DRAM1, CH25H, FOXD4L1, PTGES, SAA2, SLC39A14, RIPK2, PANX2, HS3ST3B1, IL23A, ROR1-AS1, AP002784.1, TMEM132A, ADAMTS5, OSM, RGS3, BMP6, STC1, SIRPA, RFX8, TMEM158, PAX1, IL24, ODAM, BCAT1, AC099494.2, ZNF697, C2CD4A, CCRL2, LAMA1, LSS, TGFB3, TM4SF1, CCL7, FFAR3, QPCTL, GRAMD1A, DNAJB5, ARSG, NRP2, INSM1, ICAM1, REP15, ACSL4, AC073862.5, LYN, AKR1C1, SDK1, THBS2, IL4I1, PILRA, SLC39A8, NEU4, MT1A, NRIP3, C2CD4B, ASPHD1, SLC11A1, SPRR2B, NFKB2, TNFRSF9, and NKX3-1.

[0134] In some embodiments, the positive control agent is an antibody that binds to IL1α. In other embodiments, the kit further comprises a tool for obtaining the sample from a subject. In yet other embodiments, the tool is suitable for obtaining a skin sample from the subject. In some embodiments, the kit further comprises a tool for administering the inhibitor of IL1α to the sample.

[0135] In some embodiments, the subject has atopic dermatitis, hidradenitis suppurativa, psoriasis, cutaneous lupus erythematosus, or autoimmune bullous disease. In one embodiment, the subject has atopic dermatitis. In another embodiment, the subject has hidradenitis suppurativa.

### 4. BRIEF DESCRIPTION OF THE FIGURES

[0136] FIGS. 1A and 1B show the level of IL1α is elevated in ex vivo biopsy explant culture model at both 4-hour and 24-hour time point. FIG. 1A illustrates the ex vivo biopsy explant culture experimental setup. FIG. 1B shows that secreted IL1α level was measured using Luminex and was shown to be upregulated both at 4 hr and 24 hr time point compared to control (n=4 mm biopsy, 5-8 donors).

[0137] FIGS. 2A and 2B show the effects of IL1α blockade on secreted cytokine levels in supernatant of skin biopsy explant culture at 4 hr (3 mm, 4 mm or 6 mm). FIG. 2A illustrates the ex vivo biopsy explant culture experimental setup to evaluate PD effects of IL1α blockade. FIG. 2B shows the level of secreted cytokine was measured using Luminex (Millipore, HCYTMAG-60K-PX41) after 4 hours of ex vivo biopsy explant culture using 3 mm, 4 mm or 6 mm skin biopsies (1 donor, 3 replicates per donor). Treatment using anti-IL1α (open round dot) significantly reduced cytokine level compared to samples cultured with no treatment (black round dot) for all skin biopsy size evaluated. However, dynamic range (difference between 4 hr and 4 hr+anti-IL1α) was much smaller in 3 mm than 4 mm or 6 mm biopsy size.

[0138] FIG. 3 shows lidocaine injection affects ability of anti-IL1α to reduce level of GCSF, CXCL1 and IL8 in culture supernatant at 4-hour, but not at 24-hour time point. The level of secreted cytokine was measured using Luminex after 4 hours or 24 hours of ex vivo biopsy explant culture using biopsies (4 mm) that were obtained from skin that were injected with PBS (black circle) or 1% lidocaine (black square), (n=5 donors for 4-hour, n=3 donors for 24-hour, each dot or square represent the average of 3-5 replicates from each donor).

[0139] FIGS. 4A and 4B show that anti-IL1α treatment can reduce elevated level of GCSF, CXCL1, IL4, IL6, IL8, MDC and IP10 cytokines in supernatant of ex vivo biopsy explant culture model (with lidocaine injection) at 24-hour time point. The level of secreted cytokine was measured using Luminex after 24 hours of ex vivo biopsy explant culture using biopsies (4 mm) that were obtained from skin that were injected with 1% lidocaine (3 donors, 1-5 replicates per donor).

[0140] FIGS. 4C to 4F show the evaluation of the ex vivo biopsy explant culture model in 10 healthy volunteers. FIG. 4C shows that luminex analysis of the culture supernatant showed the induction of various cytokines following 24 hour of culture. FIG. 4D shows that treatment with anti-IL1α can reduce the level of a subset of cytokines, i.e., CXCL1, GCSF, GMCSF, IL8, IL8, MIP1a and TGFa. The level of these cytokines were reduced by anti-IL1α treatment (>50% inhibition) and display low variance (<100%) in their inhibition response. FIG. 4E shows the induction fold change of these cytokines in the 10 healthy volunteers. FIG. 4F shows the concentrations of these cytokines in the 10 healthy volunteers.

[0141] FIGS. 5A and 5B show that anti-IL1α treatment reduces elevated level in gene expression of CCL20, CCL22, CSF3(GCSF), CXCL1, CXCL2, CXCL3, CXCL5, CXCL6, IL6, IL8, and PTGS2 in ex vivo biopsy explant culture model (with lidocaine injection) at 24-hour time point. Gene expression in ex vivo biopsy explant culture model (with lidocaine injection) was measured using Nanostring platform (Nanostring, nCounter Human Inflammation v2 panel). 40 of the 249 tested genes were induced at 24-hour time point, with geometric mean of fold change>2 among skin samples derived from three donors (FIG. 5A). Elevated gene expression in 11 of the 40 induced genes was inhibited by anti-IL1α treatment, with an average of inhibition22 30% (FIG. 5B). D1-3: three donors.

[0142] FIGS. 5C, 5D, and 5E show anti-IL 1α treatment reduces elevated level in gene expression of CCL20, CCL3, CCL4, CCL8, CFB, CSF3(GCSF), CXCL1, CXCL2, CXCL3, CXCL5, IL1B, IL6, IL8, MMP3, and PTGS2 in ex vivo biopsy explant culture model (with lidocaine injection) at 24-hour time point as measured using Nanostring in 30 skin biopsies from ten donors, with three skin biopsies per donor. FIG. 5C shows that 25 of the 249 tested genes were induced at 24-hour time point, with fold change>2 in skin samples derived from all ten donors. Elevated gene expression in 15 of the 25 cut-induced genes was inhibited by anti-IL1a treatment, with an average of inhibition>30%. FIG. 5D shows induction of the 15 genes (upper panel) and inhibition by anti-IL1a (lower pannel) among ten donors. FIG. 5E shows that elevated gene expression in 15 of the 29 induced genes was inhibited by anti-IL1α treatment, with an average of inhibition>30%. These 15 genes were defined as IL1α signature. Geomean of induced fold change of the 15 genes (upper panel) and the average of % inhibition on induction by anti-IL1a (lower panel) among ten donors are shown.

[0143] FIG. 6 shows anti IL-1a treatment can reduce elevated level in gene expression of a subset of injury-induced genes in ex vivo biopsy explant culture model at 24-hour time point. Gene expression in ex vivo biopsy explant culture model was measured using RNAseq. 1287 genes were induced after 24-hour culture (vs control) with geometric average of fold change>2 among the 10 donors, and false discovery rate (FDR)<0.05; all these 1287 genes were also induced (fold change>1.5) in each of the 10 donors. Elevated gene expression in 139 of these 1287 injury-induced genes was inhibited by anti-IL1α treatment, with an average of inhibition>20%.

[0144] FIG. 7 shows bermekimab can reduce elevated level of a subset of induced cytokines in ex vivo biopsy explant culture model at 24-hour time point. FIG. 7A indicates that measurement of cytokine level in the supernatant showed that bermekimab can reduce the level of GCSF, CXCL1, IL6 and IL8 in a dose responsive manner. FIG. 7B indicates that measurement of cytokine level in the skin tissue lysate showed that bermekimab can reduce the level of CXCL1, IL6 and IL8 in a dose responsive manner.

[0145] FIG. 8 is a schematic summarizing the Phase 1 study of Example 7.

### 5. DETAILED DESCRIPTION OF THE INVENTION

[0146] The present disclosure provides in part an effective ex vivo skin biopsy-based assay and novel biomarkers that allow for the measurement of various effects of an anti IL1α treatment.

[0147] 5.1. Definitions

[0148] As used herein, and unless otherwise specified, the terms “treat,” “treating,” and “treatment” refer to an action that occurs while a patient is suffering from a disease or disorder (e.g., such as a disease or disorder related to inflammation), which reduces the severity of the disease or disorder or retards or slows the progression of the disease or disorder.

[0149] The term “responsiveness” or “responsive” when used in reference to a treatment refers to the degree of effectiveness of the treatment in lessening or decreasing the symptoms of a disease or disorder being treated. An improvement in a disease or disorder can be characterized as a complete or partial response. “Complete response” refers to an absence of clinically detectable disease with normalization of any previously abnormal measurements. “Partial response” refers to at least about 10%, about 20%, about 30%, about 40%, about 50%, about 60%, about 70%, about 80%, or about 90% decrease in any measurable parameters of a disease or disorder.

[0150] As used herein, and unless otherwise specified, the term “therapeutically effective amount” of a compound is an amount sufficient to provide a therapeutic benefit in the treatment or management of a disease or disorder, or to delay or minimize one or more symptoms associated with the presence of the disease or disorder. A therapeutically effective amount of a compound means an amount of therapeutic agent, alone or in combination with other therapies, which provides a therapeutic benefit in the treatment or management of the disease or disorder. The term “therapeutically effective amount” can encompass an amount that improves overall therapy, reduces or avoids symptoms or causes of the disease or disorder, or enhances the therapeutic efficacy of another therapeutic agent. The term also refers to the amount of a compound that is sufficient to elicit the biological or medical response of a biological molecule (e.g., a protein, enzyme, RNA, or DNA), cell, tissue, system, animal, or human, which is being sought by a researcher, veterinarian, medical doctor, or clinician.

[0151] The term “likelihood” generally refers to an increase in the probability of an event. The term “likelihood” when used in reference to the effectiveness of a patient response can mean the increase of indicators, such as mRNA or protein expression, that may evidence an increase in the progress in treating a disease or disorder.

[0152] The term “predict” generally means to determine or tell in advance. When used to “predict” the effectiveness or responsiveness of a treatment, for example, the term “predict” can mean that the likelihood of the outcome of the treatment can be determined at the outset, before the treatment has begun, or before the treatment period has progressed substantially.

[0153] The term “monitor,” as used herein, generally refers to the overseeing, supervision, regulation, watching, tracking, or surveillance of an activity. For example, the term “monitoring the response of a subject to a treatment” refers to tracking the effectiveness or responsiveness in treating a disease or disorder in a patient. The monitoring can be performed, for example, by following the expression of mRNA or protein biomarkers.

[0154] A “biological marker” or “biomarker” is a substance whose detection indicates a particular biological state, such as, for example, the responsiveness to a treatment. In some embodiments, biomarkers can be determined individually. In other embodiments, several biomarkers can be measured simultaneously. In some embodiments, a “biomarker” indicates a change in the level of mRNA expression that may correlate with the progression of a disease, or with the susceptibility of the disease to a given treatment. In some embodiments, the biomarker is a nucleic acid, such as mRNA or cDNA. In additional embodiments, a “biomarker” indicates a change in the level of polypeptide or protein expression that may correlate with the risk or progression of a disease, or patient's susceptibility to treatment. In some embodiments, the biomarker can be a polypeptide or protein, or a fragment thereof. The relative level of specific proteins can be determined by methods known in the art. For example, antibody based methods, such as an immunoblot, enzyme-linked immunosorbent assay (ELISA), or other methods can be used.

[0155] The terms “polypeptide” and “protein,” as used interchangeably herein, refer to a polymer of three or more amino acids in a serial array, linked through peptide bonds. The term “polypeptide” includes proteins, protein fragments, protein analogues, oligopeptides, and the like. The term “polypeptide” as used herein can also refer to a peptide. The amino acids making up the polypeptide may be naturally derived, or may be synthetic. The polypeptide can be purified from a biological sample. The polypeptide, protein, or peptide also encompasses modified polypeptides, proteins, and peptides, e.g., glycopolypeptides, glycoproteins, or glycopeptides; or lipopolypeptides, lipoproteins, or lipopeptides.

[0156] The term “expressed” or “expression” as used herein refers to the transcription from a gene to give an RNA nucleic acid molecule at least complementary in part to a region of one of the two nucleic acid strands of the gene. The term “expressed” or “expression” as used herein also refers to the translation from the RNA molecule to give a protein, a polypeptide, or a portion thereof.

[0157] The term “expression level” refers to the amount, accumulation, or rate of a biomarker molecule or a gene set. An expression level can be represented, for example, by the amount or the rate of synthesis of a messenger RNA (mRNA) encoded by a gene, the amount or the rate of synthesis of a polypeptide or protein encoded by a gene, or the amount or the rate of synthesis of a biological molecule accumulated in a cell or biological fluid. The term “expression level” refers to an absolute amount of a molecule in a sample or a relative amount of the molecule, determined under steady-state or non-steady-state conditions.

[0158] An mRNA that is “upregulated” is generally increased upon a given treatment or condition, or in certain patient groups. An mRNA that is “downregulated” generally refers to a decrease in the level of expression of the mRNA in response to a given treatment or condition, or in certain patient groups. In some situations, the mRNA level can remain unchanged upon a given treatment or condition. An mRNA from a patient sample can be “upregulated” when treated with a drug, as compared to a non-treated control. This upregulation can be, for example, an increase of about 5%, about 10%, about 20%, about 30%, about 40%, about 50%, about 60%, about 70%, about 80%, about 90%, about 100%, about 200%, about 300%, about 500%, about 1,000%, about 5,000%, or more of the comparative control mRNA level. Alternatively, an mRNA can be “downregulated”, or expressed at a lower level, in response to administration of certain compounds or other agents. A downregulated mRNA can be, for example, present at a level of about 99%, about 95%, about 90%, about 80%, about 70%, about 60%, about 50%, about 40%, about 30%, about 20%, about 10%, about 1%, or less of the comparative control mRNA level.

[0159] Similarly, the level of a polypeptide or protein biomarker from a patient sample can be increased when treated with a drug, as compared to a non-treated control. This increase can be about 5%, about 10%, about 20%, about 30%, about 40%, about 50%, about 60%, about 70%, about 80%, about 90%, about 100%, about 200%, about 300%, about 500%, about 1,000%, about 5,000%, or more of the comparative control protein level. Alternatively, the level of a protein biomarker can be decreased in response to administration of certain compounds or other agents. This decrease can be, for example, present at a level of about 99%, about 95%, about 90%, about 80%, about 70%, about 60%, about 50%, about 40%, about 30%, about 20%, about 10%, about 1%, or less of the comparative control protein level.

[0160] The terms “determining,” “measuring,” “evaluating,” “assessing,” and “assaying” as used herein generally refer to any form of measurement, and include determining whether an element is present or not. These terms include quantitative and/or qualitative determinations. Assessing may be relative or absolute. “Assessing the presence of” can include determining the amount of something present, as well as determining whether it is present or absent.

[0161] The terms “nucleic acid” and “polynucleotide” are used interchangeably herein to describe a polymer of any length composed of nucleotides, e.g., deoxyribonucleotides or ribonucleotides, or compounds produced synthetically, which can hybridize with naturally occurring nucleic acids in a sequence specific manner analogous to that of two naturally occurring nucleic acids, e.g., can participate in Watson-Crick base pairing interactions. As used herein in the context of a polynucleotide sequence, the term “bases” (or “base”) is synonymous with “nucleotides” (or “nucleotide”), i.e., the monomer subunit of a polynucleotide. The terms “nucleoside” and “nucleotide” are intended to include those moieties that contain not only the known purine and pyrimidine bases, but also other heterocyclic bases that have been modified. Such modifications include methylated purines or pyrimidines, acylated purines or pyrimidines, alkylated riboses or other heterocycles. In addition, the terms “nucleoside” and “nucleotide” include those moieties that contain not only conventional ribose and deoxyribose sugars, but other sugars as well. Modified nucleosides or nucleotides also include modifications on the sugar moiety, e.g., wherein one or more of the hydroxyl groups are replaced with halogen atoms or aliphatic groups, or are functionalized as ethers, amines, or the like. “Analogues” refer to molecules having structural features that are recognized in the literature as being mimetics, derivatives, having analogous structures, or other like terms, and include, for example, polynucleotides incorporating non-natural nucleotides, nucleotide mimetics such as 2′-modified nucleosides, peptide nucleic acids, oligomeric nucleoside phosphonates, and any polynucleotide that has added substituent groups, such as protecting groups or linking moieties.

[0162] The term “complementary” refers to specific binding between polynucleotides based on the sequences of the polynucleotides. As used herein, a first polynucleotide and a second polynucleotide are complementary if they bind to each other in a hybridization assay under stringent conditions, e.g., if they produce a given or detectable level of signal in a hybridization assay. Portions of polynucleotides are complementary to each other if they follow conventional base-pairing rules, e.g., A pairs with T (or U) and G pairs with C, although small regions (e.g., fewer than about 3 bases) of mismatch, insertion, or deleted sequence may be present.

[0163] The terms “isolated” and “purified” refer to isolation of a substance (such as mRNA, DNA, or protein) such that the substance comprises a substantial portion of the sample in which it resides, i.e., greater than the portion of the substance that is typically found in its natural or un-isolated state. Typically, a substantial portion of the sample comprises, e.g., greater than 1%, greater than 2%, greater than 5%, greater than 10%, greater than 20%, greater than 50%, or more, usually up to about 90%-100% of the sample. For example, a sample of isolated mRNA can typically comprise at least about 1% total mRNA. Techniques for purifying polynucleotides are well known in the art and include, for example, gel electrophoresis, ion-exchange chromatography, affinity chromatography, flow sorting, and sedimentation according to density.

[0164] As used herein, the term “bound” indicates direct or indirect attachment. In the context of chemical structures, “bound” (or “bonded”) may refer to the existence of a chemical bond directly joining two moieties or indirectly joining two moieties (e.g., via a linking group or any other intervening portion of the molecule). The chemical bond may be a covalent bond, an ionic bond, a coordination complex, hydrogen bonding, van der Waals interactions, or hydrophobic stacking, or may exhibit characteristics of multiple types of chemical bonds. In certain instances, “bound” includes embodiments where the attachment is direct and embodiments where the attachment is indirect.

[0165] The term “sample” as used herein relates to a material or mixture of materials, typically, although not necessarily, in a tissue biopsy form, containing one or more components of interest. In some embodiments, the sample is a biological sample, which refers to a sample obtained from a biological subject, including a sample of biological tissue or fluid origin, obtained, reached, or collected in vivo or in situ. A biological sample also includes samples from a region of a biological subject containing injured cells or tissues. Such samples can be, but are not limited to, organs, tissues, and cells isolated from a mammal. Exemplary biological samples include but are not limited to cell lysate, cells, tissues, organs, organelles, a biological fluid, a blood sample, a urine sample, a skin sample, and the like.

[0166] The term “inhibit” as used herein in connection with IL1α refers to reducing any biological activity of IL1α, and an “inhibitor of IL1α” refers to an agent that can reduce any biological activity of IL1α. For example, such an inhibitor may partially, substantially or completely inhibit the biological activity of IL1α.

[0167] The term “polymerase chain reaction” or “PCR” as used herein generally refers to a procedure wherein small amounts of a nucleic acid, RNA and/or DNA, are amplified as described, for example, in U.S. Pat. No. 4,683,195. Generally, sequence information from the ends or beyond of the region of interest needs to be available, such that oligonucleotide primers can be designed; these primers will be identical or similar in sequence to opposite strands of the template to be amplified. The 5′ terminal nucleotides of the two primers may coincide with the ends of the amplified material. PCR can be used to amplify specific RNA sequences, specific DNA sequences from total genomic DNA, and cDNA transcribed from total cellular RNA, bacteriophage, or plasmid sequences, etc. See generally Mullis et al., Cold Spring Harbor Symp. Quant. Biol. 1987, 51:263-273; PCR Technology (Stockton Press, N.Y., Erlich, ed., 1989).

[0168] The term “about” or “approximately” means an acceptable error for a particular value as determined by one of ordinary skill in the art, which depends in part on how the value is measured or determined. In certain embodiments, the term “about” or “approximately” means within 1, 2, 3, or 4 standard deviations. In certain embodiments, the term “about” or “approximately” means within 50%, 20%, 15%, 10%, 9%, 8%, 7%, 6%, 5%, 4%, 3%, 2%, 1%, 0.5%, or 0.05% of a given value or range.

[0169] As used in the present disclosure and claims, the singular forms “a”, “an” and “the” include plural forms unless the context clearly dictates otherwise.

[0170] It is understood that wherever embodiments are described herein with the term “comprising” otherwise analogous embodiments described in terms of “consisting of” and/or “consisting essentially of” are also provided. It is also understood that wherever embodiments are described herein with the phrase “consisting essentially of” otherwise analogous embodiments described in terms of “consisting of” are also provided.

[0171] The term “between” as used in a phrase as such “between A and B” or “between A-B” refers to a range including both A and B.

[0172] The term “and/or” as used in a phrase such as “A and/or B” herein is intended to include both A and B; A or B; A (alone); and B (alone). Likewise, the term “and/or” as used in a phrase such as “A, B, and/or C” is intended to encompass each of the following embodiments: A, B, and C; A, B, or C; A or C; A or B; B or C; A and C; A and B; B and C; A (alone); B (alone); and C (alone).

[0173] It should be noted that if there is a discrepancy between a depicted structure and a name given to that structure, the depicted structure is to be accorded more weight. In addition, if the stereochemistry of a structure or a portion of a structure is not indicated with, for example, bold or dashed lines, the structure or portion of the structure is to be interpreted as encompassing all stereoisomers of it.

[0174] The practice of the embodiments provided herein will employ, unless otherwise indicated, conventional techniques of molecular biology, microbiology, and immunology, which are within the skill of those working in the art. Such techniques are explained fully in the literature. Examples of particularly suitable texts for consultation include the following: Sambrook et al., Molecular Cloning: A Laboratory Manual (4th ed. 2014); Glover, ed., DNA Cloning, Volumes I and II (2^{nd} ed. 1995); Immunochemical Methods in Cell and Molecular Biology (Academic Press, London); Scopes, Protein Purification: Principles and Practice (Springer Verlag, N.Y., 3rd ed. 1993); and Weir & Blackwell, eds., Handbook of Experimental Immunology, Volumes I-IV (5^{th} ed. 1996).

[0175] Bermekimab is a monoclonal anti-IL-1α antibody having heavy and light chain amino acid sequences of SEQ ID NO: 158 and SEQ ID NO: 159 respectively.

[0176] 5.2. Biomarkers and Methods of Use Thereof

[0177] 5.2.1. Biomarkers for Pharmacodynamics or Pharmacokinetic Effects

[0178] As shown in Section 6 below, elevated levels of gene expression of CCL20, CCL22, CSF3(GCSF), CXCL1, CXCL2, CXCL3, CXCL5, CXCL6, IL6, IL8, PTGS2, CCL3, CCL4, CCL8, CFB, IL1B, and MMP3 or a subset thereof in injured skin biopsy (e.g., following 24 hours of culture) are reduced by treatment with an IL1α inhibitor (in this case, an anti-IL1α antibody), and thus expression levels of these biomarkers or a subset thereof can be used to evaluate effects of IL1α blockade (in particular, IL1α blockade with an anti-IL1α antibody). Similarly, elevated levels of gene expression of GCSF (CSF3), CXCL1, IL6, GMCSF (CSF2), CCL20, CCL22, CXCL2, CXCL3, CXCL5, IL1B, PTGS2, CCL3, CCL4, CCL8, CFB, MMP3, FDCSP, PTX3, CCL3L3, CXCL8, FGF2, NEFM, TNIP3, MMP10, ADORA2A, DEFB4A, GPR84, AC243829.4, COLQ, TFPI2, SPRR2A, OXTR, CCL4L2, MMP1, TNFAIP6, HMX3, LIF, CD274, AC073862.2, TNFRSF11B, AC003092.1, SALL1, AC084871.4, CD38, NFKBIZ, ZC3H12A, SLC4A4, AL139393.3, MSC, SLC1A2, CCL2, G0S2, SLC34A2, AC073611.1, AC106865.1, AL078604.2, INHBA, LCN2, AC009303.4, TDO2, NGF, IER3, BCL2A1, SOD2, CEMIP, SAA1, TRAF1, GCH1, AC007780.1, AC007998.3, TMC1, GRM1, SPINK6, CD1D, IL17C, AC004264.1, EDNRB, DRAM1, CH25H, FOXD4L1, PTGES, SAA2, SLC39A14, RIPK2, PANX2, HS3ST3B1, IL23A, ROR1-AS1, AP002784.1, TMEM132A, ADAMTS5, OSM, RGS3, BMP6, STC1, SIRPA, RFX8, TMEM158, PAX1, IL24, ODAM, BCAT1, AC099494.2, ZNF697, C2CD4A, CCRL2, LAMA1, LSS, TGFB3, TM4SF1, CCL7, FFAR3, QPCTL, GRAMD1A, DNAJB5, ARSG, NRP2, INSM1, ICAM1, REP15, ACSL4, AC073862.5, LYN, AKR1C1, SDK1, THBS2, IL4I1, PILRA, SLC39A8, NEU4, MT1A, NRIP3, C2CD4B, ASPHD1, SLC11A1, SPRR2B, NFKB2, TNFRSF9, and NKX3-1 are reduced by treatment with an IL1α inhibitor (in this case, an anti-IL1α antibody), and thus expression of these biomarkers or a subset thereof can be used to evaluate the effects of IL1α blockade (in particular, IL1α blockade with an anti-IL1α antibody). Similarly, secretion of GCSF, CXCL1, IL4, IL6, IL8, MDC, IP10, GMCSF, MIP1a and TGFa or a subet thereof in injured skin biopsy are reduced by treatment with an IL1α inhibitor (in this case, an anti-IL1α antibody), and thus these cytokines can also be used to evaluate effects of IL1α blockade (in particular, IL1α blockade with an anti-IL1α antibody).

[0179] In one aspect, provided herein is a method of determining a pharmacodynamics (PD) or pharmacokinetic (PK) effect of an inhibitor of IL1α comprising providing a sample from a subject; administering the inhibitor of IL1α to the sample; measuring levels of one or more biomarkers in the sample; and determining the pharmacodynamic or the pharmacokinetic effect of the inhibitor of IL1α based on the levels of the one or more biomarkers. In some embodiments, the method is used for determining the PD effect of the inhibitor of IL1α.

[0180] In some embodiments, the sample is obtained by biopsy procedure and contain injured skin cells. Typically the injury arises as a result of the biopsy procedure.

[0181] In one embodiment, the sample is a skin sample.

[0182] The size of a skin sample may affect the measurement of a pharmacodynamics (PD) or pharmacokinetic (PK) effect of an inhibitor of IL1α. For example, as shown in Section 6 below, evaluation of the ex vivo skin explant-based assay at 4-hour time point indicate that 4 mm biopsy size is effective for measurement of PD response. For clinical implementation, it may be advantageous for a skin biopsy to be as small as possible as this minimizes disruption to a subject. The inventors have found that the measurements obtained in a 4 mm skin biopsy were comparable to a larger 6 mm biopsy when assessed 4 hours post-biopsy. Thus, in some embodiments, the size of the skin biopsy sample is about 3.5 mm to 4.5 mm. In some embodiments, the size of the skin biopsy sample is at least 4 mm. In some embodiments, the size of the skin biopsy sample is about 3.5 mm. In some embodiments, the size of the skin biopsy sample is about 3.6 mm. In some embodiments, the size of the skin biopsy sample is about 3.7 mm. In some embodiments, the size of the skin biopsy sample is about 3.8 mm. In some embodiments, the size of the skin biopsy sample is about 3.9 mm. In some embodiments, the size of the skin biopsy sample is about 4 mm. In some embodiments, the size of the skin biopsy sample is about 4.1 mm. In some embodiments, the size of the skin biopsy sample is about 4.2 mm. In some embodiments, the size of the skin biopsy sample is about 4.3 mm. In some embodiments, the size of the skin biopsy sample is about 4.4 mm. In some embodiments, the size of the skin biopsy sample is about 4.5 mm. In some embodiments, the size of the skin biopsy sample is about 4.6 mm. In some embodiments, the size of the skin biopsy sample is about 4.7 mm. In some embodiments, the size of the skin biopsy sample is about 4.8 mm. In some embodiments, the size of the skin biopsy sample is about 4.8 mm. In some embodiments, the size of the skin biopsy sample is about 4.9 mm. In some embodiments, the size of the skin biopsy sample is about 5.0 mm.

[0183] In one embodiment, the size of the skin sample is at least 4.0 mm. In another embodiment, the size of the skin sample is about 4.0 mm.

[0184] In some embodiments, the biopsy sample (for example, a skin sample) obtained from the subject is cultured ex vivo. An inhibitor of IL1α can be administered to the sample prior to the ex vivo culturing. In some embodiments, an inhibitor of IL1α can be administered to the sample (for example, a skin sample) during the ex vivo culturing. In other embodiments, the sample (for example, a skin sample) is cultured ex vivo for a period of time prior to administering to the sample the inhibitor of IL1α.

[0185] In some embodiments, the levels of the one or more biomarkers provided herein can be measured at a time when IL1α would have been elevated should no inhibitor of IL1α be administrated (e.g., 4 to 24 hours post the biopsy procedure).

[0186] In one embodiment the levels of the one or more biomarkers provided herein are measured in a skin sample at 4 hours post the biopsy procedure. In certain such embodiments, the levels of one or more biomarkers provided herein are measured in a skin sample that has a size of at least 4.0 mm at 4 hours post the biopsy procedure. In other embodiments, the levels of one or more biomarkers provided herein are measured in a skin sample that has a size of about 4.0 mm at 4 hours post the biopsy procedure.

[0187] In another embodiment, the levels of the one or more biomarkers provided herein are measured in a skin sample at 24 hours post the biopsy procedure. In certain such embodiments, the levels of one or more biomarkers provided herein are measured in a skin sample that has a size of at least 4.0 mm at 24 hours post the biopsy procedure. In other embodiments, the levels of one or more biomarkers provided herein are measured in a skin sample that has a size of about 4.0 mm at 24 hours post the biopsy procedure.

[0188] In addition, a local anaesthetic that is used during a biopsy procedure may affect the ability of an IL1α inhibitor to reduce the level of one or more biomarkers. For example, as shown in Section 6 below, lidocaine injection affects ability of anti-IL1α to reduce level of GCSF, CXCL1 and IL8 in culture supernatant at 4-hour, but not at 24-hour time point. Therefore, the levels of the one or more biomarkers can be measured at least 4 hours post administration of the inhibitor of IL1α. In some embodiments, the levels of the one or more biomarkers are measured at least 5 hours post administration of the inhibitor of IL1α. In some embodiments, the levels of the one or more biomarkers are measured at least 6 hours post administration of the inhibitor of IL1α. In some embodiments, the levels of the one or more biomarkers are measured at least 7 hours post administration of the inhibitor of IL1α. In some embodiments, the levels of the one or more biomarkers are measured at least 8 hours post administration of the inhibitor of IL1α. In some embodiments, the levels of the one or more biomarkers are measured at least 9 hours post administration of the inhibitor of IL1α. In some embodiments, the levels of the one or more biomarkers are measured at least 10 hours post administration of the inhibitor of IL1α. In some embodiments, the levels of the one or more biomarkers are measured at least 11 hours post administration of the inhibitor of IL1α. In some embodiments, the levels of the one or more biomarkers are measured at least 12 hours post administration of the inhibitor of IL1α. In some embodiments, the levels of the one or more biomarkers are measured at least 13 hours post administration of the inhibitor of IL1α. In some embodiments, the levels of the one or more biomarkers are measured at least 14 hours post administration of the inhibitor of IL1α. In some embodiments, the levels of the one or more biomarkers are measured at least 15 hours post administration of the inhibitor of IL1α. In some embodiments, the levels of the one or more biomarkers are measured at least 16 hours post administration of the inhibitor of IL1α. In some embodiments, the levels of the one or more biomarkers are measured at least 17 hours post administration of the inhibitor of IL1α. In some embodiments, the levels of the one or more biomarkers are measured at least 18 hours post administration of the inhibitor of IL1α. In some embodiments, the levels of the one or more biomarkers are measured at least 19 hours post administration of the inhibitor of IL1α. In some embodiments, the levels of the one or more biomarkers are measured at least 20 hours post administration of the inhibitor of IL1α. In some embodiments, the levels of the one or more biomarkers are measured at least 21 hours post administration of the inhibitor of IL1α. In some embodiments, the levels of the one or more biomarkers are measured at least 22 hours post administration of the inhibitor of IL1α. In some embodiments, the levels of the one or more biomarkers are measured at least 23 hours post administration of the inhibitor of IL1α. In some embodiments, the levels of the one or more biomarkers are measured at least 24 hours post administration of the inhibitor of IL1α. In some embodiments, the levels of the one or more biomarkers are measured at least 25 hours post administration of the inhibitor of IL1α. In some embodiments, the levels of the one or more biomarkers are measured at least 30 hours post administration of the inhibitor of IL1α.

[0189] In one embodiment, the levels of the one or more biomarkers are measured at least 24 hours post administration of the inhibitor of IL1α (for example, an anti-IL1α antibody, such as bermekimab).

[0190] In certain embodiments, the levels of one or more biomarkers are measured at least 24 hours post administration of the inhibitor of IL1α (for example, an anti-IL1α antibody, such as bermekimab) and the one or more biomarkers are selected from the group consisting of GCSF (CSF3), CXCL1, IL6, IL8, IL4, MDC, IP10, GMCSF (CSF2), MIP1a, TGFa, CCL20, CCL22, CXCL2, CXCL3, CXCL5, CXCL6, IL1B, PTGS2, CCL3, CCL4, CCL8, CFB, MMP3, FDCSP, PTX3, CCL3L3, CXCL8, FGF2, NEFM, TNIP3, MMP10, ADORA2A, DEFB4A, GPR84, AC243829.4, COLQ, TFPI2, SPRR2A, OXTR, CCL4L2, MMP1, TNFAIP6, HMX3, LIF, CD274, AC073862.2, TNFRSF11B, AC003092.1, SALL1, AC084871.4, CD38, NFKBIZ, ZC3H12A, SLC4A4, AL139393.3, MSC, SLC1A2, CCL2, GOS2, SLC34A2, AC073611.1, AC106865.1, AL078604.2, INHBA, LCN2, AC009303.4, TDO2, NGF, IER3, BCL2A1, SOD2, CEMIP, SAA1, TRAF1, GCH1, AC007780.1, AC007998.3, TMC1, GRM1, SPINK6, CD1D, IL17C, AC004264.1, EDNRB, DRAM1, CH25H, FOXD4L1, PTGES, SAA2, SLC39A14, RIPK2, PANX2, HS3ST3B1, IL23A, ROR1-AS1, AP002784.1, TMEM132A, ADAMTS5, OSM, RGS3, BMP6, STC1, SIRPA, RFX8, TMEM158, PAX1, IL24, ODAM, BCAT1, AC099494.2, ZNF697, C2CD4A, CCRL2, LAMA1, LSS, TGFB3, TM4SF1, CCL7, FFAR3, QPCTL, GRAMD1A, DNAJB5, ARSG, NRP2, INSM1, ICAM1, REP15, ACSL4, AC073862.5, LYN, AKR1C1, SDK1, THBS2, IL4I1, PILRA, SLC39A8, NEU4, MT1A, NRIP3, C2CD4B, ASPHD1, SLC11A1, SPRR2B, NFKB2, TNFRSF9, and NKX3-1.

[0191] In one embodiment, the level of CSF3 (GCSF) is measured at least 24 hours post administration of the inhibitor of IL1α (for example, an anti-IL1α antibody, such as bermekimab). In another embodiment, the level of CXCL1 is measured at least 24 hours post administration of the inhibitor of IL1α (for example, an anti-IL1α antibody, such as bermekimab). In another embodiment, the level of IL6 is measured at least 24 hours post administration of the inhibitor of IL1α (for example, an anti-IL1α antibody, such as bermekimab).

[0192] In one embodiment, the levels of CSF3 (GCSF), CXCL1 and IL6 are measured at least 24 hours post administration of the inhibitor of IL1α (for example, an anti-IL1α antibody, such as bermekimab).

[0193] In one embodiment, the levels of GCSF, CXCL1, IL6 and IL8 are measured at least 24 hours post administration of the inhibitor of IL1α (for example, an anti-IL1α antibody, such as bermekimab).

[0194] In one embodiment, the levels of CXCL1, GCSF, GMCSF, IL6, IL8, MIP1a and TGFa are measured at least 24 hours post administration of the inhibitor of IL1α (for example, an anti-IL1α antibody, such as bermekimab).

[0195] In one embodiment, the levels of GCSF, CXCL1, IL4, IL6, IL8, MDC and IP10 are measured at least 24 hours post administration of the inhibitor of IL1α (for example, an anti-IL1α antibody, such as bermekimab).

[0196] In one embodiment, the levels of GCSF, CXCL1, IL4, IL6, IL8, MDC, IP10, GMCSF, MIP1a and TGFa are measured at least 24 hours post administration of the inhibitor of IL1α (for example, an anti-IL1α antibody, such as bermekimab).

[0197] In one embodiment, the levels of CCL20, CCL22, CSF3(GCSF), CXCL1, CXCL2, CXCL3, CXCL5, CXCL6, IL6, IL8, PTGS2, CCL3, CCL4, CCL8, CFB, IL1B, and MMP3 are measured at least 24 hours post administration of the inhibitor of IL1α (for example, an anti-IL1α antibody, such as bermekimab).

[0198] In one embodiment, the levels of CCL20, CCL22, CSF3(GCSF), CXCL1, CXCL2, CXCL3, CXCL5, CXCL6, IL6, IL8, and PTGS2 are measured at least 24 hours post administration of the inhibitor of IL1α (for example, an anti-IL1α antibody, such as bermekimab).

[0199] In one embodiment, the levels of CCL20, CCL3, CCL4, CCL8, CFB, CSF3(GCSF), CXCL1, CXCL2, CXCL3, CXCL5, IL1B, IL6, IL8, MMP3 are measured at least 24 hours post administration of the inhibitor of IL1α (for example, an anti-IL1α antibody, such as bermekimab).

[0200] In one embodiment, the levels of CCL20, CSF3(GCSF), CXCL1, CXCL2, CXCL3, CXCL5, IL6, IL8, and PTGS2 are measured at least 24 hours post administration of the inhibitor of IL1α (for example, an anti-IL 1α antibody, such as bermekimab).

[0201] The time point at which the biomarkers are measured may also be defined according to the time elapsed since the biopsy procedure was performed. As discussed above, a local anaesthetic that is used in the biopsy procedure may affect the ability of an IL1α inhibitor to reduce the level of one or more biomarkers. Thus, in some embodiments, the levels of the one or more biomarkers are measured at least 4 hours post the biopsy procedure. In some embodiments, the levels of the one or more biomarkers are measured at least 5 hours post the biopsy procedure. In some embodiments, the levels of the one or more biomarkers are measured at least 6 hours post the biopsy procedure. In some embodiments, the levels of the one or more biomarkers are measured at least 7 hours post the biopsy procedure. In some embodiments, the levels of the one or more biomarkers are measured at least 8 hours post the biopsy procedure. In some embodiments, the levels of the one or more biomarkers are measured at least 9 hours post the biopsy procedure. In some embodiments, the levels of the one or more biomarkers are measured at least 10 hours post the biopsy procedure. In some embodiments, the levels of the one or more biomarkers are measured at least 11 hours post the biopsy procedure. In some embodiments, the levels of the one or more biomarkers are measured at least 12 hours post the biopsy procedure. In some embodiments, the levels of the one or more biomarkers are measured at least 13 hours post the biopsy procedure. In some embodiments, the levels of the one or more biomarkers are measured at least 14 hours post the biopsy procedure. In some embodiments, the levels of the one or more biomarkers are measured at least 15 hours post the biopsy procedure. In some embodiments, the levels of the one or more biomarkers are measured at least 16 hours post the biopsy procedure. In some embodiments, the levels of the one or more biomarkers are measured at least 17 hours post the biopsy procedure. In some embodiments, the levels of the one or more biomarkers are measured at least 18 hours post the biopsy procedure. In some embodiments, the levels of the one or more biomarkers are measured at least 19 hours post the biopsy procedure. In some embodiments, the levels of the one or more biomarkers are measured at least 20 hours post the biopsy procedure. In some embodiments, the levels of the one or more biomarkers are measured at least 21 hours post the biopsy procedure. In some embodiments, the levels of the one or more biomarkers are measured at least 22 hours post the biopsy procedure. In some embodiments, the levels of the one or more biomarkers are measured at least 23 hours post the biopsy procedure. In some embodiments, the levels of the one or more biomarkers are measured at least 24 hours post the biopsy procedure. In some embodiments, the levels of the one or more biomarkers are measured at least 25 hours post the biopsy procedure. In some embodiments, the levels of the one or more biomarkers are measured at least 30 hours post the biopsy procedure.

[0202] In one embodiment, the levels of the one or more biomarkers are measured at least 24 hours post the biopsy procedure.

[0203] In certain embodiments, the levels of one or more biomarkers are measured at least 24 hours post the biopsy procedure and the one or more biomarkers are selected from the group consisting of GCSF (CSF3), CXCL1, IL6, IL8, IL4, MDC, IP10, GMCSF (CSF2), MIP1a, TGFa, CCL20, CCL22, CXCL2, CXCL3, CXCL5, CXCL6, IL1B, PTGS2, CCL3, CCL4, CCL8, CFB, MMP3, FDCSP, PTX3, CCL3L3, CXCL8, FGF2, NEFM, TNIP3, MMP10, ADORA2A, DEFB4A, GPR84, AC243829.4, COLQ, TFPI2, SPRR2A, OXTR, CCL4L2, MMP1, TNFAIP6, HMX3, LIF, CD274, AC073862.2, TNFRSF11B, AC003092.1, SALL1, AC084871.4, CD38, NFKBIZ, ZC3H12A, SLC4A4, AL139393.3, MSC, SLC1A2, CCL2, GOS2, SLC34A2, AC073611.1, AC106865.1, AL078604.2, INHBA, LCN2, AC009303.4, TDO2, NGF, IER3, BCL2A1, SOD2, CEMIP, SAA1, TRAF1, GCH1, AC007780.1, AC007998.3, TMC1, GRM1, SPINK6, CD1D, IL17C, AC004264.1, EDNRB, DRAM1, CH25H, FOXD4L1, PTGES, SAA2, SLC39A14, RIPK2, PANX2, HS3ST3B1, IL23A, ROR1-AS1, AP002784.1, TMEM132A, ADAMTS5, OSM, RGS3, BMP6, STC1, SIRPA, RFX8, TMEM158, PAX1, IL24, ODAM, BCAT1, AC099494.2, ZNF697, C2CD4A, CCRL2, LAMA1, LSS, TGFB3, TM4SF1, CCL7, FFAR3, QPCTL, GRAMD1A, DNAJB5, ARSG, NRP2, INSM1, ICAM1, REP15, ACSL4, AC073862.5, LYN, AKR1C1, SDK1, THBS2, IL4I1, PILRA, SLC39A8, NEU4, MT1A, NRIP3, C2CD4B, ASPHD1, SLC11A1, SPRR2B, NFKB2, TNFRSF9, and NKX3-1.

[0204] In one embodiment, the level of CSF3 (GCSF) is measured at least 24 hours post the biopsy procedure. In another embodiment, the level of CXCL1 is measured at least 24 hours post the biopsy procedure. In another embodiment, the level of IL6 is measured at least 24 hours post the biopsy procedure.

[0205] In one embodiment, the levels of CSF3 (GCSF), CXCL1 and IL6 are measured at least 24 hours post the biopsy procedure.

[0206] In one embodiment, the levels of GCSF, CXCL1, IL6 and IL8 are measured at least 24 hours post the biopsy procedure.

[0207] In one embodiment, the levels of CXCL1, GCSF, GMCSF, IL6, IL8, MIP1a and TGFa are measured at least 24 hours post the biopsy procedure.

[0208] In one embodiment, the levels of GCSF, CXCL1, IL4, IL6, IL8, MDC and IP10 are measured at least 24 hours post the biopsy procedure.

[0209] In one embodiment, the levels of GCSF, CXCL1, IL4, IL6, IL8, MDC, IP10, GMCSF, MIP1a and TGFa are measured at least 24 hours post the biopsy procedure.

[0210] In one embodiment, the levels of CCL20, CCL22, CSF3(GCSF), CXCL1, CXCL2, CXCL3, CXCL5, CXCL6, IL6, IL8, PTGS2, CCL3, CCL4, CCL8, CFB, IL1B, and MMP3 are measured at least 24 hours post the biopsy procedure.

[0211] In one embodiment, the levels of CCL20, CCL22, CSF3(GCSF), CXCL1, CXCL2, CXCL3, CXCL5, CXCL6, IL6, IL8, and PTGS2 are measured at least 24 hours post the biopsy procedure.

[0212] In one embodiment, the levels of CCL20, CCL3, CCL4, CCL8, CFB, CSF3(GCSF), CXCL1, CXCL2, CXCL3, CXCL5, IL1B, IL6, IL8, MMP3 are measured at least 24 hours post the biopsy procedure.

[0213] In one embodiment, the levels of CCL20, CSF3(GCSF), CXCL1, CXCL2, CXCL3, CXCL5, IL6, IL8, and PTGS2 are measured at least 24 hours post the biopsy procedure).

[0214] The effects of the inhibitor of IL1α (for example, an anti-IL1α antibody, such as bermekimab) can be determined by comparing the levels of the one or more biomarkers provided herein with reference levels of these biomarkers.

[0215] The reference levels of these biomarkers can be the levels of these biomarkers in a reference injured skin sample (for example, a skin biopsy sample) without any influence by an inhibitor of IL1α (for example, an anti-IL1α antibody, such as bermekimab), and the levels of the biomarkers in the sample and the levels of the biomarkers in the reference sample are measured at the same time point (for example, at least 4 hours or at least 24 hours post the biopsy procedure).

[0216] In some embodiments, the reference levels of the one or more biomarkers are the levels of the one or more biomarkers in a reference sample from the subject prior to administration of the inhibitor of IL1α. In some embodiments, the reference levels of the one or more biomarkers are the levels of the one or more biomarkers in a reference sample from the subject without administration of the inhibitor of IL1α. In some embodiments, the reference levels of the one or more biomarkers are pre-determined levels of the one or more biomarkers. In some embodiments, the reference levels of the one or more biomarkers are the levels of the one or more biomarkers in a reference sample administered with a control agent (e.g., a positive control agent that inhibits IL1α, such as the anti-IL1α antibody R&D, clone 4414, or a negative control agent that does not inhibit IL1α).

[0217] In one embodiment, the reference levels of the one or more biomarkers are the levels of the one or more biomarkers in a reference skin biopsy sample from the subject without administration of the inhibitor of IL1α, and the levels of the biomarkers in the sample and the levels of the biomarkers in the reference sample are measured at the same time point.

[0218] When the levels of the biomarkers are compared to the references levels that represent the elevated levels of these biomarkers post injury (e.g. biopsy induced injury) but without the influence of an inhibitor of IL1α, the lower levels of the one or more biomarkers as compared with the reference levels indicate that the inhibitor is effective in inhibiting IL1α.

[0219] In some embodiments, the inhibitor is identified as effective in inhibiting IL1α if the levels of the one or more biomarkers in the sample are at least 20%, are at least 30%, at least 35%, at least 40%, or at least 50% less than the reference levels.

[0220] In one embodiment, the inhibitor is identified as effective in inhibiting IL1α if the levels of the one or more cytokine biomarkers secreted by the sample (for example, as measured by a Luminex assay) are at least 50% less than the reference levels. In another embodiment, the inhibitor is identified as effective in inhibiting IL1α if the mRNA levels (for example, as measured by a Nanostring assay) of the one or more biomarkers in the sample are at least 30% less than the reference levels. In another embodiment, the inhibitor is identified as effective in inhibiting IL1α if the mRNA levels (for example, as measured by an RNAseq assay) of the one or more biomarkers in the sample are at least 20% less than the reference levels.

[0221] In another aspect, a pharmacodynamics or pharmacokinetic effect of an inhibitor of IL1α is determined by administering the inhibitor directly to the subject. The subjects who received an effective IL1α inhibitor may be protected from injury-mediated upregulation (e.g. by biopsy procedure) of IL1α and subsequent downstream effects.

[0222] Thus, in some more embodiments, provided herein is a method for determining a pharmacodynamics or pharmacokinetic effect of an inhibitor of IL1α, comprises: i. obtaining a first sample from a subject; ii. administering an IL1α inhibitor to the subject; iii. obtaining a second sample from the subject; iv. measuring levels of one or more biomarkers in the first sample and the second sample; and v. determining that the treatment is effective when the levels of the one or more biomarkers in the second sample are lower than the levels of one or more biomarkers in the first sample. In some embodiments, the first sample and the second sample are from the same source.

[0223] In some embodiments, the second sample is obtained from the subject at 1.5 to 2.5 hours post the administration of the IL1α inhibitor to the subject. In some embodiments, the second sample is obtained from the subject at about 1.5 hours post the administration. In some embodiments, the second sample is obtained from the subject at about 1.6 hours post the administration. In some embodiments, the second sample is obtained from the subject at about 1.7 hours post the administration. In some embodiments, the second sample is obtained from the subject at about 1.8 hours post the administration. In some embodiments, the second sample is obtained from the subject at about 1.9 hours post the administration. In some embodiments, the second sample is obtained from the subject at about 2.0 hours post the administration. In some embodiments, the second sample is obtained from the subject at about 2.1 hours post the administration. In some embodiments, the second sample is obtained from the subject at about 2.2 hours post the administration. In some embodiments, the second sample is obtained from the subject at about 2.3 hours post the administration. In some embodiments, the second sample is obtained from the subject at about 2.4 hours post the administration. In some embodiments, the second sample is obtained from the subject at about 2.5 hours post the administration.

[0224] The first and second samples may contain skin cells. In some embodiments, the sample is obtained by biopsy procedure and contain injured skin cells. In some embodiments, the size of the skin biopsy sample is about 3.5 mm to 4.5 mm. In some embodiments, the size of the skin biopsy sample is at least 4 mm. In some embodiments, the size of the skin biopsy sample is about 3.5 mm. In some embodiments, the size of the skin biopsy sample is about 3.6 mm. In some embodiments, the size of the skin biopsy sample is about 3.7 mm. In some embodiments, the size of the skin biopsy sample is about 3.8 mm. In some embodiments, the size of the skin biopsy sample is about 3.9 mm. In some embodiments, the size of the skin biopsy sample is about 4 mm. In some embodiments, the size of the skin biopsy sample is about 4.1 mm. In some embodiments, the size of the skin biopsy sample is about 4.2 mm. In some embodiments, the size of the skin biopsy sample is about 4.3 mm. In some embodiments, the size of the skin biopsy sample is about 4.4 mm. In some embodiments, the size of the skin biopsy sample is about 4.5 mm. In some embodiments, the size of the skin biopsy sample is about 4.6 mm. In some embodiments, the size of the skin biopsy sample is about 4.7 mm. In some embodiments, the size of the skin biopsy sample is about 4.8 mm. In some embodiments, the size of the skin biopsy sample is about 4.8 mm. In some embodiments, the size of the skin biopsy sample is about 4.9 mm. In some embodiments, the size of the skin biopsy sample is about 5.0 mm. In some embodiments, the biopsy sample obtained from the subject is cultured ex vivo.

[0225] In one embodiment, the size of the skin sample is at least 4.0 mm. In another embodiment, the size of the skin sample is about 4.0 mm.

[0226] In other embodiments, the sample used in the methods provided herein may comprise body fluids from a subject. In some embodiments, the sample is a blood sample. More detailed description of a sample is provided in Section 5.3 below.

[0227] In some embodiments, the levels of the one or more biomarkers provided herein can be measured at a time when IL1α would have been elevated should no inhibitor of IL1α be administrated (e.g., 4 to 24 hours post the biopsy procedure). In some embodiments, the levels of the one or more biomarkers are measured at least 4 hours post the biopsy procedure. In some embodiments, the levels of the one or more biomarkers are measured at least 5 hours post the biopsy procedure. In some embodiments, the levels of the one or more biomarkers are measured at least 6 hours post the biopsy procedure. In some embodiments, the levels of the one or more biomarkers are measured at least 7 hours post the biopsy procedure. In some embodiments, the levels of the one or more biomarkers are measured at least 8 hours post the biopsy procedure. In some embodiments, the levels of the one or more biomarkers are measured at least 9 hours post the biopsy procedure. In some embodiments, the levels of the one or more biomarkers are measured at least 10 hours post the biopsy procedure. In some embodiments, the levels of the one or more biomarkers are measured at least 11 hours post the biopsy procedure. In some embodiments, the levels of the one or more biomarkers are measured at least 12 hours post the biopsy procedure. In some embodiments, the levels of the one or more biomarkers are measured at least 13 hours post the biopsy procedure. In some embodiments, the levels of the one or more biomarkers are measured at least 14 hours post the biopsy procedure. In some embodiments, the levels of the one or more biomarkers are measured at least 15 hours post the biopsy procedure. In some embodiments, the levels of the one or more biomarkers are measured at least 16 hours post the biopsy procedure. In some embodiments, the levels of the one or more biomarkers are measured at least 17 hours post the biopsy procedure. In some embodiments, the levels of the one or more biomarkers are measured at least 18 hours post the biopsy procedure. In some embodiments, the levels of the one or more biomarkers are measured at least 19 hours post the biopsy procedure. In some embodiments, the levels of the one or more biomarkers are measured at least 20 hours post the biopsy procedure. In some embodiments, the levels of the one or more biomarkers are measured at least 21 hours post the biopsy procedure. In some embodiments, the levels of the one or more biomarkers are measured at least 22 hours post the biopsy procedure. In some embodiments, the levels of the one or more biomarkers are measured at least 23 hours post the biopsy procedure. In some embodiments, the levels of the one or more biomarkers are measured at least 24 hours post the biopsy procedure. In some embodiments, the levels of the one or more biomarkers are measured at least 25 hours post the biopsy procedure. In some embodiments, the levels of the one or more biomarkers are measured at least 30 hours post the biopsy procedure.

[0228] In one embodiment, the levels of the one or more biomarkers are measured at least 4 hours post the biopsy procedure. In another embodiment, the levels of the one or more biomarkers are measured at least 24 hours post the biopsy procedure.

[0229] In some embodiments, the levels of the one or more biomarkers are the expression levels of one or more biomarkers selected from a group consisting of GCSF (CSF3), CXCL1, IL6, IL8, IL4, MDC, IP10, GMCSF (CSF2), MIP1a, TGFa, CCL20, CCL22, CXCL2, CXCL3, CXCLS, CXCL6, IL1B, PTGS2, CCL3, CCL4, CCL8, CFB, MMP3, FDCSP, PTX3, CCL3L3, CXCL8, FGF2, NEFM, TNIP3, MMP10, ADORA2A, DEFB4A, GPR84, AC243829.4, COLQ, TFPI2, SPRR2A, OXTR, CCL4L2, MMP1, TNFAIP6, HMX3, LIF, CD274, AC073862.2, TNFRSF11B, AC003092.1, SALL1, AC084871.4, CD38, NFKBIZ, ZC3H12A, SLC4A4, AL139393.3, MSC, SLC1A2, CCL2, GOS2, SLC34A2, AC073611.1, AC106865.1, AL078604.2, INHBA, LCN2, AC009303.4, TDO2, NGF, IER3, BCL2A1, SOD2, CEMIP, SAA1, TRAF1, GCH1, AC007780.1, AC007998.3, TMC1, GRM1, SPINK6, CD1D, IL17C, AC004264.1, EDNRB, DRAM1, CH25H, FOXD4L1, PTGES, SAA2, SLC39A14, RIPK2, PANX2, HS3ST3B1, IL23A, ROR1-AS1, AP002784.1, TMEM132A, ADAMTSS, OSM, RGS3, BMP6, STC1, SIRPA, RFX8, TMEM158, PAX1, IL24, ODAM, BCAT1, AC099494.2, ZNF697, C2CD4A, CCRL2, LAMA1, LSS, TGFB3, TM4SF1, CCL7, FFAR3, QPCTL, GRAMD1A, DNAJB5, ARSG, NRP2, INSM1, ICAM1, REP15, ACSL4, AC073862.5, LYN, AKR1C1, SDK1, THBS2, IL4I1, PILRA, SLC39A8, NEU4, MT1A, NRIP3, C2CD4B, ASPHD1, SLC11A1, SPRR2B, NFKB2, TNFRSF9, and NKX3-1.

[0230] In some embodiments, the levels of the one or more biomarkers are the expression levels of one or more biomarkers selected from a group consisting of GCSF (CSF3), CXCL1, IL6, GMCSF (CSF2), CCL20, CCL22, CXCL2, CXCL3, CXCL5, IL1B, PTGS2, CCL3, CCL4, CCL8, CFB, MMP3, FDCSP, PTX3, CCL3L3, CXCL8, FGF2, NEFM, TNIP3, MMP10, ADORA2A, DEFB4A, GPR84, AC243829.4, COLQ, TFPI2, SPRR2A, OXTR, CCL4L2, MMP1, TNFAIP6, HMX3, LIF, CD274, AC073862.2, TNFRSF11B, AC003092.1, SALL1, AC084871.4, CD38, NFKBIZ, ZC3H12A, SLC4A4, AL139393.3, MSC, SLC1A2, CCL2, GOS2, SLC34A2, AC073611.1, AC106865.1, AL078604.2, INHBA, LCN2, AC009303.4, TDO2, NGF, IER3, BCL2A1, SOD2, CEMIP, SAA1, TRAF1, GCH1, AC007780.1, AC007998.3, TMC1, GRM1, SPINK6, CD1D, IL17C, AC004264.1, EDNRB, DRAM1, CH25H, FOXD4L1, PTGES, SAA2, SLC39A14, RIPK2, PANX2, HS3ST3B1, IL23A, ROR1-AS1, AP002784.1, TMEM132A, ADAMTS5, OSM, RGS3, BMP6, STC1, SIRPA, RFX8, TMEM158, PAX1, IL24, ODAM, BCAT1, AC099494.2, ZNF697, C2CD4A, CCRL2, LAMA1, LSS, TGFB3, TM4SF1, CCL7, FFAR3, QPCTL, GRAMD1A, DNAJB5, ARSG, NRP2, INSM1, ICAM1, REP15, ACSL4, AC073862.5, LYN, AKR1C1, SDK1, THBS2, IL4I1, PILRA, SLC39A8, NEU4, MT1A, NRIP3, C2CD4B, ASPHD1, SLC11A1, SPRR2B, NFKB2, TNFRSF9, and NKX3-1.

[0231] In some embodiments, the levels of the one or more biomarkers are the expression levels of one or more biomarkers selected from a group consisting of CCL20, CCL22, CSF3(GCSF), CXCL1, CXCL2, CXCL3, CXCL5, CXCL6, IL6, IL8, PTGS2, CCL3, CCL4, CCL8, CFB, IL1B, and MMP3.

[0232] In some embodiments, the levels of the one or more biomarkers are the expression levels of one or more biomarkers selected from a group consisting of CCL20, CCL22, CSF3(GCSF), CXCL1, CXCL2, CXCL3, CXCL5, CXCL6, IL6, IL8, and PTGS2. In other embodiments, the levels of the one or more biomarkers are the expression levels of one or more biomarkers selected from a group consisting of CCL20, CCL3, CCL4, CCL8, CFB, CSF3(GCSF), CXCL1, CXCL2, CXCL3, CXCL5, IL1B, IL6, IL8, MMP3, and PTGS2.

[0233] In some embodiments, the one or more biomarkers comprises CCL20. In some embodiments, the one or more biomarkers comprises CCL22. In some embodiments, the one or more biomarkers comprises CSF3. In other embodiments, the one or more biomarkers comprises CXCL1. In other embodiments, the one or more biomarkers comprises CXCL2. In other embodiments, the one or more biomarkers comprises CXCL3. In other embodiments, the one or more biomarkers comprises CXCL5. In other embodiments, the one or more biomarkers comprises CXCL6. In yet other embodiments, the one or more biomarkers comprises IL6. In yet other embodiments, the one or more biomarkers comprises IL8. In yet other embodiments, the one or more biomarkers comprises PTGS2. In yet other embodiments, the one or more biomarkers comprises CCL3. In yet other embodiments, the one or more biomarkers comprises CCL4. In yet other embodiments, the one or more biomarkers comprises CCL8. In yet other embodiments, the one or more biomarkers comprises CFB. In yet other embodiments, the one or more biomarkers comprises IL1B. In yet other embodiments, the one or more biomarkers comprises MMP3.

[0234] In one embodiment, the one or more biomarkers comprise CSF3 (GCSF). In another embodiment, the one ore more biomarkers comprise CXCL1. In another embodiment, the one or more biomarkers comprise IL6.

[0235] In some embodiments, the method provided herein comprises measuring all of CCL20, CCL22, CSF3(GCSF), CXCL1, CXCL2, CXCL3, CXCL5, CXCL6, IL6, IL8, PTGS2, CCL3, CCL4, CCL8, CFB, IL1B, and MMP3. Totality of the expression levels of these biomarkers is used to determine the effects of the inhibitor. Any classification methods or algorithms useful for comparing the totality of the expressions of these biomarkers with a reference are included herein. For example, a composite score based on the expression levels of these biomarkers can be used. In some instances a composite score may be calculated based on the geometric mean of the expression levels of these biomarkers. A composite score based on comparing the expression levels of these biomarkers with and without treatment may be used. In some instances, a composite score may be calculated using the average of percentage of reduction on the expression levels (following treatment) of these biomarkers. This approach may allow variations of individual gene expression in different subjects. Similarly, this method also applies to a subset including 2 or more biomarkers selected from CCL20, CCL22, CSF3(GCSF), CXCL1, CXCL2, CXCL3, CXCL5, CXCL6, IL6, IL8, PTGS2, CCL3, CCL4, CCL8, CFB, IL1B, and MMP3

[0236] In some embodiments, the one or more biomarkers are CCL20, CCL22, CSF3(GCSF), CXCL1, CXCL2, CXCL3, CXCL5, CXCL6, IL6, IL8, and PTGS2. In some embodiments, a composite score is calculated based on the levels of CCL20, CCL22, CSF3, CXCL1, CXCL2, CXCL3, CXCL5, CXCL6, IL6, IL8, and PTGS2, and wherein the method further comprises comparing the composite score to a reference score.

[0237] In other embodiments, the one or more biomarkers are CCL20, CCL3, CCL4, CCL8, CFB, CSF3(GCSF), CXCL1, CXCL2, CXCL3, CXCL5, IL1B, IL6, IL8, MMP3, and PTGS2. In some embodiments, a composite score is calculated based on the levels of CCL20, CCL3, CCL4, CCL8, CFB, CSF3(GCSF), CXCL1, CXCL2, CXCL3, CXCL5, IL1B, IL6, IL8, MMP3, and PTGS2, and wherein the method further comprises comparing the composite score to a reference score.

[0238] In other embodiments, the one or more biomarkers are CCL20, CSF3(GCSF), CXCL1, CXCL2, CXCL3, CXCL5, IL6, IL8, and PTGS2. In some embodiments, a composite score is calculated based on the levels of CCL20, CSF3(GCSF), CXCL1, CXCL2, CXCL3, CXCL5, IL6, IL8, and PTGS2, and wherein the method further comprises comparing the composite score to a reference score.

[0239] In one embodiment, the one or more biomarkers are CSF3 (GCSF), CXCL1 and IL6. In one embodiment, a composite score is calculated based on the levels of CSF3 (GCSF), CXCL1 and IL6, and wherein the method further comprises comparing the composite score to a reference score.

[0240] The levels of the biomarkers provided herein can be measured by determining protein levels or nucleic acid levels (e.g., mRNA, DNA or cDNA levels) of these biomarkers. In one embodiment, the levels of the biomarkes provided herein are measured by determining protein levels of these biomarkers. In another embodiment, the levels of the biomarkers provided herein are measured by determining mRNA levels of these biomarkers. Detailed description of these measurement methods are provided in the following sections.

[0241] In some embodiments, the levels of the one or more biomarkers are the levels of cytokines secreted by the sample selected from a group consisting of GCSF, CXCL1, IL4, IL6, IL8, MDC, IP10, GMCSF, MIP1a and TGFa.

[0242] In some embodiments, the levels of the one or more biomarkers are the levels of cytokines secreted by the sample selected from a group consisting of GCSF, CXCL1, IL4, IL6, IL8, MDC and IP10.

[0243] In some embodiments, the levels of the one or more biomarkers are the levels of cytokines secreted by the sample selected from a group consisting of CXCL1, GCSF, GMCSF, IL6, IL8, MIP1a and TGFa.

[0244] In some embodiments, the one or more biomarkers comprises GCSF. In some embodiments, the one or more biomarkers comprises CXCL1. In other embodiments, the one or more biomarkers comprises IL4. In other embodiments, the one or more biomarkers comprises IL6. In other embodiments, the one or more biomarkers comprises IL8. In other embodiments, the one or more biomarkers comprises MDC. In other embodiments, the one or more biomarkers comprises IP10. In other embodiments, the one or more biomarkers comprises GMCSF. In other embodiments, the one or more biomarkers comprises MIP1a. In other embodiments, the one or more biomarkers comprises TGFa.

[0245] In some embodiments, the method provided herein comprises measuring all of GCSF, CXCL1, IL4, IL6, IL8, MDC, IP10, GMCSF, MIP1a and TGFa. Totality of the expression levels of these biomarkers is used to determine the effects of the inhibitor. Any classification methods or algorithms useful for comparing the totality of the expressions of these biomarkers with a reference are included herein. For example, a composite score based on the expression levels of these biomarkers can be used. In some instances, a composite score may be calculated based on the geometric mean of the expression levels of these biomarkers. A composite score based on comparing the expression levels of these biomarkers with and without treatment may be used. In some instances, a composite score may be calculated using the average of percentage of reduction on the expression levels (following treatment) of these biomarkers. Similarly, this method also applies to a subset including 2 or more biomarkers selected from GCSF, CXCL1, IL4, IL6, IL8, MDC, IP10, GMCSF, MIP1a and TGFa.

[0246] In some embodiments, the one or more biomarkers are GCSF, CXCL1, IL4, IL6, IL8, MDC and IP10. In some embodiments, a composite score is calculated based on the levels of GCSF, CXCL1, IL4, IL6, IL8, MDC and IP10, and wherein the method further comprises comparing the composite score to a reference score.

[0247] In some embodiments, the one or more biomarkers are CXCL1, GCSF, GMCSF, IL6, IL8, MIP1a and TGFa. In some embodiments, a composite score is calculated based on the levels of CXCL1, GCSF, GMCSF, IL6, IL8, MIP1a and TGFa, and wherein the method further comprises comparing the composite score to a reference score.

[0248] In some embodiments, the one or more biomarkers are GCSF, CXCL1, IL6 and IL8. In some embodiments, a composite score is calculated based on the levels of GCSF, CXCL1, IL6 and IL8, and wherein the method further comprises comparing the composite score to a reference score.

[0249] In one embodiment, the one or more biomarkers are CSF3 (GCSF), CXCL1 and IL6. In one embodiment, a composite score is calculated based on the levels of CSF3 (GCSF), CXCL1 and IL6, and wherein the method further comprises comparing the composite score to a reference score.

[0250] In some embodiments, the levels of the biomarkers provided herein can be measured by determining protein levels of these biomarkers. Detailed description of these measurement methods are provided in the following sections.

[0251] In some embodiments of the various methods provided herein, the level(s) of the one or more biomarker(s) post treatment with the IL1α inhibitor is compared with the reference leve(s) of the same biomarker(s) from a sample cultured for the same amount of time without the treatment, and compared with another reference level(s) of the same biomarker(s) in a control sample. In some embodiments, the control sample is a positive control using another IL1α inhibitor (for example, the anti-IL1α antibody R&D, clone 4414). In other embodiments, the control sample is a negative control using a compound that is not an IL1α inhibitor. In yet other embodiments, another reference level(s) of the same biomarker(s) in a control sample is the level(s) of the biomarker(s) in a control sample just obtained from the subject, e.g., within 30 mins after obtaining the sample from the subject or within the period before IL1α level is elevated.

[0252] In some embodiments, the various methods provided herein can be used to measure PD and/or PK effects of an anti-IL1α treatment in healthy subjects. In other embodiments, the various methods provided herein can be used to measure PD and/or PK effects of an anti-IL1α treatment in a subject having atopic dermatitis, hidradenitis suppurativa, psoriasis, cutaneous lupus erythematosus, or autoimmune bullous disease. In one embodiment, the various methods provided herein are used to measure PD and/or PK effects of an anti-IL1α treatment in a subject having atopic dermatitis. In another embodiment, the various methods provided herein are used to measure PD and/or PK effects of an anti-IL1α treatment in a subject having hidradenitis suppurativa.

[0253] 5.2.2. Biomarkers for Monitoring Responses

[0254] The methods and biomarkers provided herein can be used to evaluate the responsiveness to a treatment comprising an inhibitor of IL1α (for example an anti-IL1α antibody, such as bermekimab). In other embodiments, provided herein is a method of monitoring the response of a subject to a treatment comprising an inhibitor of IL1α (for example an anti-IL1α antibody, such as bermekimab). In yet other embodiments, provided herein is a method for determining dosing regimens of an inhibitor of IL1α (for example an anti-IL1α antibody, such as bermekimab).

[0255] In some embodiments, the method provided herein comprises contacting an inhibitor of IL1α (for example an anti-IL1α antibody, such as bermekimab) with a sample ex vivo. In other embodiments, the method provided herein comprises administering an inhibitor of IL1α (for example an anti-IL1α antibody, such as bermekimab) directly to a subject for predicting or monitoring responsiveness of the subject to the inhibitor of IL1α (for example an anti-IL1α antibody, such as bermekimab).

[0256] In one aspect, provided herein is a method for monitoring the response of a subject to a treatment comprising an inhibitor of IL1α (for example an anti-IL1α antibody, such as bermekimab) comprising providing a sample from the subject; administering the inhibitor of IL1α (for example an anti-IL1α antibody, such as bermekimab) to the sample; measuring levels of one or more biomarkers in the sample; and identifying the subject as being likely to be responsive to the treatment comprising the inhibitor of IL1α (for example an anti-IL1α antibody, such as bermekimab), predicting the responsiveness of the subject to the treatment comprising the inhibitor of IL1α (for example an anti-IL1α antibody, such as bermekimab), or monitoring the response of the subject to a treatment comprising the inhibitor of IL1α (for example an anti-IL1α antibody, such as bermekimab), based on the levels of the one or more biomarkers.

[0257] The effects of the inhibitor of IL1α (for example an anti-IL1α antibody, such as bermekimab) can be determined by comparing the levels of the one or more biomarkers provided herein with reference levels of these biomarkers.

[0258] The reference levels of these biomarkers can be the levels of these biomarkers in a reference injured skin sample (for example a skin biopsy sample) without any influence by an inhibitor of IL1α (for example an anti-IL1α antibody, such as bermekimab), and the levels of the biomarkers in the sample and the levels of the biomarkers in the reference sample are measured at the same time point (for example, at least 4 hours or at least 24 hours post the biopsy procedure).

[0259] In some embodiments, the reference levels of the one or more biomarkers are the levels of the one or more biomarkers in a reference sample from the subject prior to administration of the inhibitor of IL1α (for example an anti-IL1α antibody, such as bermekimab). In some embodiments, the reference levels of the one or more biomarkers are the levels of the one or more biomarkers in a reference sample from the subject without administration of the inhibitor of IL1α (for example an anti-IL1α antibody, such as bermekimab). In some embodiments, the reference levels of the one or more biomarkers are pre-determined levels of the one or more biomarkers. In some embodiments, the reference levels of the one or more biomarkers are the levels of the one or more biomarkers in a reference sample administered with a control agent (e.g., a positive control agent that inhibits IL1α, such as the anti-IL1α antibody R&D, clone 4414, or a negative control agent that does not inhibit IL1α).

[0260] In one embodiment, the reference levels of the one or more biomarkers are the levels of the one or more biomarkers in a reference skin biopsy sample from the subject without administration of the inhibitor of IL1α, and the levels of the biomarkers in the sample and the levels of the biomarkers in the reference sample are measured at the same time point.

[0261] When the levels of the biomarkers are compared to the reference levels that represent the elevated levels of these biomarkers post injury (e.g. biopsy induced injury) but without the influence of an inhibitor of IL1α (for example an anti-IL1α antibody, such as bermekimab), the lower levels of the one or more biomarkers as compared with the references indicate that subject is likely to be responsive to the treatment comprising the inhibitor of IL1α (for example an anti-IL1α antibody, such as bermekimab).

[0262] In some embodiments, the subject is identified likely to be responsive to the treatment comprising the inhibitor of IL1α if the levels of the one or more biomarkers in the sample are at least 20%, at least 30%, at least 35%, at least 40%, or at least 50% less than the reference levels.

[0263] In one embodiment, the subject is identified likely to be responsive to the treatment comprising the inhibitor of IL1α if the levels of the one or more cytokine biomarkers secreted by the sample (for example, as measured by a Luminex assay) are at least 50% less than the reference levels. In another embodiment, the subject is identified likely to be responsive to the treatment comprising the inhibitor of IL1α if the mRNA levels (for example, as measured by a Nanostring assay) of the one or more biomarkers in the sample are at least 30% less than the reference levels. In another embodiment, the subject is identified likely to be responsive to the treatment comprising the inhibitor of IL1α if the mRNA levels (for example, as measured by an RNAseq assay) of the one or more biomarkers in the sample are at least 20% less than the reference levels.

[0264] In some embodiments, the sample is obtained by biopsy procedure and contain injured skin cells. In some embodiments, the size of the skin biopsy sample is about 3.5 mm to 4.5 mm. In some embodiments, the size of the skin biopsy sample is at least 4 mm. In some embodiments, the size of the skin biopsy sample is about 3.5 mm. In some embodiments, the size of the skin biopsy sample is about 3.6 mm. In some embodiments, the size of the skin biopsy sample is about 3.7 mm. In some embodiments, the size of the skin biopsy sample is about 3.8 mm. In some embodiments, the size of the skin biopsy sample is about 3.9 mm. In some embodiments, the size of the skin biopsy sample is about 4 mm. In some embodiments, the size of the skin biopsy sample is about 4.1 mm. In some embodiments, the size of the skin biopsy sample is about 4.2 mm. In some embodiments, the size of the skin biopsy sample is about 4.3 mm. In some embodiments, the size of the skin biopsy sample is about 4.4 mm. In some embodiments, the size of the skin biopsy sample is about 4.5 mm. In some embodiments, the size of the skin biopsy sample is about 4.6 mm. In some embodiments, the size of the skin biopsy sample is about 4.7 mm. In some embodiments, the size of the skin biopsy sample is about 4.8 mm. In some embodiments, the size of the skin biopsy sample is about 4.8 mm. In some embodiments, the size of the skin biopsy sample is about 4.9 mm. In some embodiments, the size of the skin biopsy sample is about 5.0 mm.

[0265] In one embodiment, the size of the skin sample is at least 4.0 mm. In another embodiment, the size of the skin sample is about 4.0 mm.

[0266] In other embodiments, the sample used in the methods provided herein may comprises body fluids from a subject. In some embodiments, the sample is a blood sample. More detailed description of a sample is provided in Section 5.3 below.

[0267] In some embodiments, the biopsy sample (for example, a skin sample) obtained from the subject is cultured ex vivo. An inhibitor of IL1α can be administered to the sample (for example, a skin sample) prior to the ex vivo culturing. In some embodiments, an inhibitor of IL1α can be administered to the sample (for example, a skin sample) during the ex vivo culturing.

[0268] In other embodiments, the sample (for example, a skin sample) is cultured ex vivo for a period of time prior to administering to the sample the inhibitor of IL1α.

[0269] In some embodiments, the levels of the one or more biomarkers provided herein can be measured at a time when IL1α would have been elevated should no inhibitor of IL1α be administrated (e.g., 4 to 24 hours post the biopsy procedure).

[0270] In some embodiments the levels of the one or more biomarkers provided herein are measured in a skin sample at 4 hours post the biopsy procedure. In certain such embodiments, the levels of one or more biomarkers provided herein are measured in a skin sample that has a size of at least 4.0 mm at 4 hours post the biopsy procedure. In other embodiments, the levels of one or more biomarkers provided herein are measured in a skin sample that has a size of about 4.0 mm at 4 hours post the biopsy procedure.

[0271] In another embodiment, the levels of the one or more biomarkers provided herein are measured in a skin sample at 24 hours post the biopsy procedure. In certain such embodiments, the levels of one or more biomarkers provided herein are measured in a skin sample that has a size of at least 4.0 mm at 24 hours post the biopsy procedure. In other embodiments, the levels of one or more biomarkers provided herein are measured in a skin sample that has a size of about 4.0 mm at 24 hours post the biopsy procedure.

[0272] The levels of the one or more biomarkers can be measured at least 4 hours post administration of the inhibitor of IL1α. In some embodiments, the levels of the one or more biomarkers are measured at least 5 hours post administration of the inhibitor of IL1α. In some embodiments, the levels of the one or more biomarkers are measured at least 6 hours post administration of the inhibitor of IL1α. In some embodiments, the levels of the one or more biomarkers are measured at least 7 hours post administration of the inhibitor of IL1α. In some embodiments, the levels of the one or more biomarkers are measured at least 8 hours post administration of the inhibitor of IL1α. In some embodiments, the levels of the one or more biomarkers are measured at least 9 hours post administration of the inhibitor of IL1α. In some embodiments, the levels of the one or more biomarkers are measured at least 10 hours post administration of the inhibitor of IL1α. In some embodiments, the levels of the one or more biomarkers are measured at least 11 hours post administration of the inhibitor of IL1α. In some embodiments, the levels of the one or more biomarkers are measured at least 12 hours post administration of the inhibitor of IL1α. In some embodiments, the levels of the one or more biomarkers are measured at least 13 hours post administration of the inhibitor of IL1α. In some embodiments, the levels of the one or more biomarkers are measured at least 14 hours post administration of the inhibitor of IL1α. In some embodiments, the levels of the one or more biomarkers are measured at least 15 hours post administration of the inhibitor of IL1α. In some embodiments, the levels of the one or more biomarkers are measured at least 16 hours post administration of the inhibitor of IL1α. In some embodiments, the levels of the one or more biomarkers are measured at least 17 hours post administration of the inhibitor of IL1α. In some embodiments, the levels of the one or more biomarkers are measured at least 18 hours post administration of the inhibitor of IL1α. In some embodiments, the levels of the one or more biomarkers are measured at least 19 hours post administration of the inhibitor of IL1α. In some embodiments, the levels of the one or more biomarkers are measured at least 20 hours post administration of the inhibitor of IL1α. In some embodiments, the levels of the one or more biomarkers are measured at least 21 hours post administration of the inhibitor of IL1α. In some embodiments, the levels of the one or more biomarkers are measured at least 22 hours post administration of the inhibitor of IL1α. In some embodiments, the levels of the one or more biomarkers are measured at least 23 hours post administration of the inhibitor of IL1α. In some embodiments, the levels of the one or more biomarkers are measured at least 24 hours post administration of the inhibitor of IL1α. In some embodiments, the levels of the one or more biomarkers are measured at least 25 hours post administration of the inhibitor of IL1α. In some embodiments, the levels of the one or more biomarkers are measured at least 30 hours post administration of the inhibitor of IL1α.

[0273] In one embodiment, the levels of the one or more biomarkers are measured at least 24 hours post administration of the inhibitor of IL1α (for example, an anti-IL1α antibody, such as bermekimab).

[0274] In certain embodiments, the levels of one or more biomarkers are measured at least 24 hours post administration of the inhibitor of IL1α and the one or more biomarkers are selected from the group consisting of GCSF (CSF3), CXCL1, IL6, IL8, IL4, MDC, IP10, GMCSF (CSF2), MIP1a, TGFa, CCL20, CCL22, CXCL2, CXCL3, CXCLS, CXCL6, IL1B, PTGS2, CCL3, CCL4, CCL8, CFB, MMP3, FDCSP, PTX3, CCL3L3, CXCL8, FGF2, NEFM, TNIP3, MMP10, ADORA2A, DEFB4A, GPR84, AC243829.4, COLQ, TFPI2, SPRR2A, OXTR, CCL4L2, MMP1, TNFAIP6, HMX3, LIF, CD274, AC073862.2, TNFRSF11B, AC003092.1, SALL1, AC084871.4, CD38, NFKBIZ, ZC3H12A, SLC4A4, AL139393.3, MSC, SLC1A2, CCL2, GOS2, SLC34A2, AC073611.1, AC106865.1, AL078604.2, INHBA, LCN2, AC009303.4, TDO2, NGF, IER3, BCL2A1, SOD2, CEMIP, SAA1, TRAF1, GCH1, AC007780.1, AC007998.3, TMC1, GRM1, SPINK6, CD1D, IL17C, AC004264.1, EDNRB, DRAM1, CH25H, FOXD4L1, PTGES, SAA2, SLC39A14, RIPK2, PANX2, HS3ST3B1, IL23A, ROR1-AS1, AP002784.1, TMEM132A, ADAMTS5, OSM, RGS3, BMP6, STC1, SIRPA, RFX8, TMEM158, PAX1, IL24, ODAM, BCAT1, AC099494.2, ZNF697, C2CD4A, CCRL2, LAMA1, LSS, TGFB3, TM4SF1, CCL7, FFAR3, QPCTL, GRAMD1A, DNAJB5, ARSG, NRP2, INSM1, ICAM1, REP15, ACSL4, AC073862.5, LYN, AKR1C1, SDK1, THBS2, IL4I1, PILRA, SLC39A8, NEU4, MT1A, NRIP3, C2CD4B, ASPHD1, SLC11A1, SPRR2B, NFKB2, TNFRSF9, and NKX3-1.

[0275] In one embodiment, the level of CSF3 (GCSF) is measured at least 24 hours post administration of the inhibitor of IL1α (for example, an anti-IL1α antibody, such as bermekimab). In another embodiment, the level of CXCL1 is measured at least 24 hours post administration of the inhibitor of IL1α (for example, an anti-IL1α antibody, such as bermekimab). In another embodiment, the level of IL6 is measured at least 24 hours post administration of the inhibitor of IL1α (for example, an anti-IL1α antibody, such as bermekimab).

[0276] In one embodiment, the levels of CSF3 (GCSF), CXCL1 and IL6 are measured at least 24 hours post administration of the inhibitor of IL1α (for example, an anti-IL1α antibody, such as bermekimab).

[0277] In one embodiment, the levels of GCSF, CXCL1, IL6 and IL8 are measured at least 24 hours post administration of the inhibitor of IL1α (for example, an anti-IL1α antibody, such as bermekimab).

[0278] In one embodiment, the levels of CXCL1, GCSF, GMCSF, IL6, IL8, MIP1a and TGFa are measured at least 24 hours post administration of the inhibitor of IL1α (for example, an anti-IL1α antibody, such as bermekimab).

[0279] In one embodiment, the levels of GCSF, CXCL1, IL4, IL6, IL8, MDC and IP10 are measured at least 24 hours post administration of the inhibitor of IL1α (for example, an anti-IL1α antibody, such as bermekimab).

[0280] In one embodiment, the levels of GCSF, CXCL1, IL4, IL6, IL8, MDC, IP10, GMCSF, MIP1a and TGFa are measured at least 24 hours post administration of the inhibitor of IL1α (for example, an anti-IL1α antibody, such as bermekimab).

[0281] In one embodiment, the levels of CCL20, CCL22, CSF3(GCSF), CXCL1, CXCL2, CXCL3, CXCL5, CXCL6, IL6, IL8, PTGS2, CCL3, CCL4, CCL8, CFB, IL1B, and MMP3 are measured at least 24 hours post administration of the inhibitor of IL1α (for example, an anti-IL1α antibody, such as bermekimab).

[0282] In one embodiment, the levels of CCL20, CCL22, CSF3(GCSF), CXCL1, CXCL2, CXCL3, CXCL5, CXCL6, IL6, IL8, and PTGS2 are measured at least 24 hours post administration of the inhibitor of IL1α (for example, an anti-IL1α antibody, such as bermekimab).

[0283] In one embodiment, the levels of CCL20, CCL3, CCL4, CCL8, CFB, CSF3(GCSF), CXCL1, CXCL2, CXCL3, CXCL5, IL1B, IL6, IL8, MMP3 are measured at least 24 hours post administration of the inhibitor of IL1α (for example, an anti-IL1α antibody, such as bermekimab).

[0284] In one embodiment, the levels of CCL20, CSF3(GCSF), CXCL1, CXCL2, CXCL3, CXCL5, IL6, IL8, and PTGS2 are measured at least 24 hours post administration of the inhibitor of IL1α (for example, an anti-IL la antibody, such as bermekimab).

[0285] In some embodiments, the levels of the one or more biomarkers are measured at least 4 hours post the biopsy procedure. In some embodiments, the levels of the one or more biomarkers are measured at least 5 hours post the biopsy procedure. In some embodiments, the levels of the one or more biomarkers are measured at least 6 hours post the biopsy procedure. In some embodiments, the levels of the one or more biomarkers are measured at least 7 hours post the biopsy procedure. In some embodiments, the levels of the one or more biomarkers are measured at least 8 hours post the biopsy procedure. In some embodiments, the levels of the one or more biomarkers are measured at least 9 hours post the biopsy procedure. In some embodiments, the levels of the one or more biomarkers are measured at least 10 hours post the biopsy procedure. In some embodiments, the levels of the one or more biomarkers are measured at least 11 hours post the biopsy procedure. In some embodiments, the levels of the one or more biomarkers are measured at least 12 hours post the biopsy procedure. In some embodiments, the levels of the one or more biomarkers are measured at least 13 hours post the biopsy procedure. In some embodiments, the levels of the one or more biomarkers are measured at least 14 hours post the biopsy procedure. In some embodiments, the levels of the one or more biomarkers are measured at least 15 hours post the biopsy procedure. In some embodiments, the levels of the one or more biomarkers are measured at least 16 hours post the biopsy procedure. In some embodiments, the levels of the one or more biomarkers are measured at least 17 hours post the biopsy procedure. In some embodiments, the levels of the one or more biomarkers are measured at least 18 hours post the biopsy procedure. In some embodiments, the levels of the one or more biomarkers are measured at least 19 hours post the biopsy procedure. In some embodiments, the levels of the one or more biomarkers are measured at least 20 hours post the biopsy procedure. In some embodiments, the levels of the one or more biomarkers are measured at least 21 hours post the biopsy procedure. In some embodiments, the levels of the one or more biomarkers are measured at least 22 hours post the biopsy procedure. In some embodiments, the levels of the one or more biomarkers are measured at least 23 hours post the biopsy procedure. In some embodiments, the levels of the one or more biomarkers are measured at least 24 hours post the biopsy procedure. In some embodiments, the levels of the one or more biomarkers are measured at least 25 hours post the biopsy procedure. In some embodiments, the levels of the one or more biomarkers are measured at least 30 hours post the biopsy procedure.

[0286] In one embodiment, the levels of the one or more biomarkers are measured at least 24 hours post the biopsy procedure.

[0287] In certain embodiments, the levels of one or more biomarkers are measured at least 24 hours post the biopsy procedure and the one or more biomarkers are selected from the group consisting of GCSF (CSF3), CXCL1, IL6, IL8, IL4, MDC, IP10, GMCSF (CSF2), MIP1a, TGFa, CCL20, CCL22, CXCL2, CXCL3, CXCLS, CXCL6, IL1B, PTGS2, CCL3, CCL4, CCL8, CFB, MMP3, FDCSP, PTX3, CCL3L3, CXCL8, FGF2, NEFM, TNIP3, MMP10, ADORA2A, DEFB4A, GPR84, AC243829.4, COLQ, TFPI2, SPRR2A, OXTR, CCL4L2, MMP1, TNFAIP6, HMX3, LIF, CD274, AC073862.2, TNFRSF11B, AC003092.1, SALL1, AC084871.4, CD38, NFKBIZ, ZC3H12A, SLC4A4, AL139393.3, MSC, SLC1A2, CCL2, GOS2, SLC34A2, AC073611.1, AC106865.1, AL078604.2, INHBA, LCN2, AC009303.4, TDO2, NGF, IER3, BCL2A1, SOD2, CEMIP, SAA1, TRAF1, GCH1, AC007780.1, AC007998.3, TMC1, GRM1, SPINK6, CD1D, IL17C, AC004264.1, EDNRB, DRAM1, CH25H, FOXD4L1, PTGES, SAA2, SLC39A14, RIPK2, PANX2, HS3ST3B1, IL23A, ROR1-AS1, AP002784.1, TMEM132A, ADAMTS5, OSM, RGS3, BMP6, STC1, SIRPA, RFX8, TMEM158, PAX1, IL24, ODAM, BCAT1, AC099494.2, ZNF697, C2CD4A, CCRL2, LAMA1, LSS, TGFB3, TM4SF1, CCL7, FFAR3, QPCTL, GRAMD1A, DNAJB5, ARSG, NRP2, INSM1, ICAM1, REP15, ACSL4, AC073862.5, LYN, AKR1C1, SDK1, THBS2, IL4I1, PILRA, SLC39A8, NEU4, MT1A, NRIP3, C2CD4B, ASPHD1, SLC11A1, SPRR2B, NFKB2, TNFRSF9, and NKX3-1.

[0288] In one embodiment, the level of CSF3 (GCSF) is measured at least 24 hours post the biopsy procedure. In another embodiment, the level of CXCL1 is measured at least 24 hours post the biopsy procedure. In another embodiment, the level of IL6 is measured at least 24 hours post the biopsy procedure.

[0289] In one embodiment, the levels of CSF3 (GCSF), CXCL1 and IL6 are measured at least 24 hours post the biopsy procedure.

[0290] In one embodiment, the levels of GCSF, CXCL1, IL6 and IL8 are measured at least 24 hours post the biopsy procedure.

[0291] In one embodiment, the levels of CXCL1, GCSF, GMCSF, IL6, IL8, MIP1a and TGFa are measured at least 24 hours post the biopsy procedure.

[0292] In one embodiment, the levels of GCSF, CXCL1, IL4, IL6, IL8, MDC and IP10 are measured at least 24 hours post the biopsy procedure.

[0293] In one embodiment, the levels of GCSF, CXCL1, IL4, IL6, IL8, MDC, IP10, GMCSF, MIP1a and TGFa are measured at least 24 hours post the biopsy procedure.

[0294] In one embodiment, the levels of CCL20, CCL22, CSF3(GCSF), CXCL1, CXCL2, CXCL3, CXCL5, CXCL6, IL6, IL8, PTGS2, CCL3, CCL4, CCL8, CFB, IL1B, and MMP3 are measured at least 24 hours post the biopsy procedure.

[0295] In one embodiment, the levels of CCL20, CCL22, CSF3(GCSF), CXCL1, CXCL2, CXCL3, CXCL5, CXCL6, IL6, IL8, and PTGS2 are measured at least 24 hours post the biopsy procedure.

[0296] In one embodiment, the levels of CCL20, CCL3, CCL4, CCL8, CFB, CSF3(GCSF), CXCL1, CXCL2, CXCL3, CXCL5, IL1B, IL6, IL8, MMP3 are measured at least 24 hours post the biopsy procedure.

[0297] In one embodiment, the levels of CCL20, CSF3(GCSF), CXCL1, CXCL2, CXCL3, CXCL5, IL6, IL8, and PTGS2 are measured at least 24 hours post the biopsy procedure).

[0298] In another aspect, the biomarkers provided herein and changes thereof upon treatment with an IL1α inhibitor (e.g., decreased levels of the biomarkers upon treatment) can be used for monitoring the response of a subject having an IL1α mediated disease to an IL1α inhibitor or determining an effective dose of an IL1a inhibitor to be administered to a subject having an IL1a mediated disease.

[0299] Therefore, in some embodiments, provided herein is a method for monitoring the response of a subject having an IL1α mediated disease to an IL1α inhibitor or determining an effective dose of an IL1α inhibitor to be administered to a subject having an IL1α mediated disease comprising administering an IL1α inhibitor to the subject; obtain a sample from the subject; measuring levels of one or more biomarkers in the sample; and monitoring the response and/or determining the effectiveness of the dose based on the levels of the one or more biomarkers. In some embodiments, the levels of the one or more biomarkers are compared with reference levels of the one or more biomarkers, thereby monitoring the response and/or determining the effectiveness of the dose. In some embodiments, the reference levels are pre-determined levels. In other embodiments, the reference levels are the levels of the one or more biomarkers prior to the treatment.

[0300] In one embodiment, the reference levels of the one or more biomarkers are the levels of the one or more biomarkers in a reference skin biopsy sample from the subject prior to administration of the inhibitor of IL1α, and the levels of the biomarkers in the sample and the levels of the biomarkers in the reference sample are measured at the same time point.

[0301] The subjects who received an effective IL1α inhibitor may be protected from injury-mediated upregulation (e.g. by biopsy procedure) of IL1α and subsequent downstream effects. Thus, in some more specific embodiments, the method provided herein comprises: i. obtaining a first sample from a subject; ii. administering an IL1α inhibitor to the subject; iii. obtaining a second sample from the subject; iv. measuring levels of one or more biomarkers in the first sample and the second sample; and v. determining that the treatment is effective when the levels of the one or more biomarkers in the second sample are lower than the levels of one or more biomarkers in the first sample. In some embodiments, the first sample and the second sample are from the same source.

[0302] In some embodiments, the IL1α inhibitor is an anti-IL1α antibody, such as bermekimab.

[0303] In some embodiments, the IL1α mediated disease is atopic dermatitis, hidradenitis suppurativa, psoriasis, cutaneous lupus erythematosus, or autoimmune bullous disease. In one embodiment, the IL1α mediated disease is atopic dermatitis. In another embodiment, the IL1α mediated disease is hidradenitis suppurativa.

[0304] Thus, in some embodiments, the biomarkers provided herein and changes thereof upon treatment with an anti-IL1α antibody (such as bermekimab) can be used for monitoring the response of a subject having atopic dermatitis to an anti-IL1α antibody (such as bermekimab) or determining an effective dose of an anti-IL1α antibody (such as bermekimab) to be administered to a subject having atopic dermatitis.

[0305] In other embodiments, the biomarkers provided herein and changes thereof upon treatment with an anti-IL1α antibody (such as bermekimab) can be used for monitoring the response of a subject having hidradenitis suppurativa to an anti-IL1α antibody (such as bermekimab) or determining an effective dose of an anti-IL1α antibody (such as bermekimab) to be administered to a subject having hidradenitis suppurativa.

[0306] In certain embodiments, the one or more biomarkers are selected from the group consisting of GCSF (CSF3), CXCL1, IL6, IL8, IL4, MDC, IP10, GMCSF (CSF2), MIP1a, TGFa, CCL20, CCL22, CXCL2, CXCL3, CXCL5, CXCL6, IL1B, PTGS2, CCL3, CCL4, CCL8, CFB, MMP3, FDCSP, PTX3, CCL3L3, CXCL8, FGF2, NEFM, TNIP3, MMP10, ADORA2A, DEFB4A, GPR84, AC243829.4, COLQ, TFPI2, SPRR2A, OXTR, CCL4L2, MMP1, TNFAIP6, HMX3, LIF, CD274, AC073862.2, TNFRSF11B, AC003092.1, SALL1, AC084871.4, CD38, NFKBIZ, ZC3H12A, SLC4A4, AL139393.3, MSC, SLC1A2, CCL2, GOS2, SLC34A2, AC073611.1, AC106865.1, AL078604.2, INHBA, LCN2, AC009303.4, TDO2, NGF, IER3, BCL2A1, SOD2, CEMIP, SAA1, TRAF1, GCH1, AC007780.1, AC007998.3, TMC1, GRM1, SPINK6, CD1D, IL17C, AC004264.1, EDNRB, DRAM1, CH25H, FOXD4L1, PTGES, SAA2, SLC39A14, RIPK2, PANX2, HS3ST3B1, IL23A, ROR1-AS1, AP002784.1, TMEM132A, ADAMTS5, OSM, RGS3, BMP6, STC1, SIRPA, RFX8, TMEM158, PAX1, IL24, ODAM, BCAT1, AC099494.2, ZNF697, C2CD4A, CCRL2, LAMA1, LSS, TGFB3, TM4SF1, CCL7, FFAR3, QPCTL, GRAMD1A, DNAJB5, ARSG, NRP2, INSM1, ICAM1, REP15, ACSL4, AC073862.5, LYN, AKR1C1, SDK1, THBS2, IL4I1, PILRA, SLC39A8, NEU4, MT1A, NRIP3, C2CD4B, ASPHD1, SLC11A1, SPRR2B, NFKB2, TNFRSF9, and NKX3-1.

[0307] In one embodiment, the one or more biomarkers comprise CSF3 (GCSF). In one embodiment, the one or more biomarkers comprise CXCL1. In one embodiment, the one or more biomarkers comprise IL6.

[0308] In one embodiment, the one or more biomarkers comprise CSF3 (GCSF), CXCL1 and IL6.

[0309] In one embodiment, the one or more biomarkers comprise GCSF, CXCL1, IL6 and IL8.

[0310] In one embodiment, the one or more biomarkers comprise CXCL1, GCSF, GMCSF, IL6, IL8, MIP1a and TGFa.

[0311] In one embodiment, the one or more biomarkers comprise GCSF, CXCL1, IL4, IL6, IL8, MDC and IP10.

[0312] In one embodiment, the one or more biomarkers comprise GCSF, CXCL1, IL4, IL6, IL8, MDC, IP10, GMCSF, MIP1a and TGFa.

[0313] In one embodiment, the one or more biomarkers comprise CCL20, CSF3(GCSF), CXCL1, CXCL2, CXCL3, CXCL5, IL6, IL8, and PTGS2.

[0314] In one embodiment, the one or more biomarkers comprise CCL20, CCL3, CCL4, CCL8, CFB, CSF3(GCSF), CXCL1, CXCL2, CXCL3, CXCL5, IL1B, IL6, IL8, MMP3, and PTGS2.

[0315] In one embodiment, the one or more biomarkers are CCL20, CCL22, CSF3(GCSF), CXCL1, CXCL2, CXCL3, CXCL5, CXCL6, IL6, IL8, and PTGS2.

[0316] In one embodiment, the one or more biomarkers are CCL20, CCL22, CSF3(GCSF), CXCL1, CXCL2, CXCL3, CXCL5, CXCL6, IL6, IL8, PTGS2, CCL3, CCL4, CCL8, CFB, IL1B, and MMP3.

[0317] In some embodiments, the second sample is obtained from the subject at 1.5 to 2.5 hours post the administration of the IL1α inhibitor to the subject. In some embodiments, the second sample is obtained from the subject at about 1.5 hours post the administration. In some embodiments, the second sample is obtained from the subject at about 1.6 hours post the administration. In some embodiments, the second sample is obtained from the subject at about 1.7 hours post the administration. In some embodiments, the second sample is obtained from the subject at about 1.8 hours post the administration. In some embodiments, the second sample is obtained from the subject at about 1.9 hours post the administration. In some embodiments, the second sample is obtained from the subject at about 2.0 hours post the administration. In some embodiments, the second sample is obtained from the subject at about 2.1 hours post the administration. In some embodiments, the second sample is obtained from the subject at about 2.2 hours post the administration. In some embodiments, the second sample is obtained from the subject at about 2.3 hours post the administration. In some embodiments, the second sample is obtained from the subject at about 2.4 hours post the administration. In some embodiments, the second sample is obtained from the subject at about 2.5 hours post the administration.

[0318] In some embodiments, the methods provided herein further comprises adjusting treatment regimens (e.g., dosage, frequency, treatment cycle or treatment length) based on the measurements of the biomarkers provided herein.

[0319] The first and second samples may contain skin cells. In some embodiments, the sample is obtained by biopsy procedure and contain injured skin cells. In some embodiments, the size of the skin biopsy sample is about 3.5 mm to 4.5 mm. In some embodiments, the size of the skin biopsy sample is at least 4 mm. In some embodiments, the size of the skin biopsy sample is about 3.5 mm. In some embodiments, the size of the skin biopsy sample is about 3.6 mm. In some embodiments, the size of the skin biopsy sample is about 3.7 mm. In some embodiments, the size of the skin biopsy sample is about 3.8 mm. In some embodiments, the size of the skin biopsy sample is about 3.9 mm. In some embodiments, the size of the skin biopsy sample is about 4 mm. In some embodiments, the size of the skin biopsy sample is about 4.1 mm. In some embodiments, the size of the skin biopsy sample is about 4.2 mm. In some embodiments, the size of the skin biopsy sample is about 4.3 mm. In some embodiments, the size of the skin biopsy sample is about 4.4 mm. In some embodiments, the size of the skin biopsy sample is about 4.5 mm. In some embodiments, the size of the skin biopsy sample is about 4.6 mm. In some embodiments, the size of the skin biopsy sample is about 4.7 mm. In some embodiments, the size of the skin biopsy sample is about 4.8 mm. In some embodiments, the size of the skin biopsy sample is about 4.8 mm. In some embodiments, the size of the skin biopsy sample is about 4.9 mm. In some embodiments, the size of the skin biopsy sample is about 5.0 mm. In some embodiments, the biopsy sample obtained from the subject is cultured ex vivo.

[0320] In one embodiment, the size of the skin sample is at least 4.0 mm. In another embodiment, the size of the skin sample is about 4.0 mm.

[0321] In other embodiments, the sample used in the methods provided herein may comprises body fluids from a subject. In some embodiments, the sample is a blood sample. More detailed description of a sample is provided in Section 5.3 below.

[0322] In some embodiments, the levels of the one or more biomarkers provided herein can be measured at a time when IL1α would have been elevated should no inhibitor of IL1α be administrated (e.g., 4 to 24 hours post the biopsy procedure). In some embodiments, the levels of the one or more biomarkers are measured at least 4 hours post the biopsy procedure. In some embodiments, the levels of the one or more biomarkers are measured at least 5 hours post the biopsy procedure. In some embodiments, the levels of the one or more biomarkers are measured at least 6 hours post the biopsy procedure. In some embodiments, the levels of the one or more biomarkers are measured at least 7 hours post the biopsy procedure. In some embodiments, the levels of the one or more biomarkers are measured at least 8 hours post the biopsy procedure. In some embodiments, the levels of the one or more biomarkers are measured at least 9 hours post the biopsy procedure. In some embodiments, the levels of the one or more biomarkers are measured at least 10 hours post the biopsy procedure. In some embodiments, the levels of the one or more biomarkers are measured at least 11 hours post the biopsy procedure. In some embodiments, the levels of the one or more biomarkers are measured at least 12 hours post the biopsy procedure. In some embodiments, the levels of the one or more biomarkers are measured at least 13 hours post the biopsy procedure. In some embodiments, the levels of the one or more biomarkers are measured at least 14 hours post the biopsy procedure. In some embodiments, the levels of the one or more biomarkers are measured at least 15 hours post the biopsy procedure. In some embodiments, the levels of the one or more biomarkers are measured at least 16 hours post the biopsy procedure. In some embodiments, the levels of the one or more biomarkers are measured at least 17 hours post the biopsy procedure. In some embodiments, the levels of the one or more biomarkers are measured at least 18 hours post the biopsy procedure. In some embodiments, the levels of the one or more biomarkers are measured at least 19 hours post the biopsy procedure. In some embodiments, the levels of the one or more biomarkers are measured at least 20 hours post the biopsy procedure. In some embodiments, the levels of the one or more biomarkers are measured at least 21 hours post the biopsy procedure. In some embodiments, the levels of the one or more biomarkers are measured at least 22 hours post the biopsy procedure. In some embodiments, the levels of the one or more biomarkers are measured at least 23 hours post the biopsy procedure. In some embodiments, the levels of the one or more biomarkers are measured at least 24 hours post the biopsy procedure. In some embodiments, the levels of the one or more biomarkers are measured at least 25 hours post the biopsy procedure. In some embodiments, the levels of the one or more biomarkers are measured at least 30 hours post the biopsy procedure.

[0323] In one embodiment, the levels of the one or more biomarkers are measured at least 24 hours post the biopsy procedure.

[0324] In certain embodiments, the levels of one or more biomarkers are measured at least 24 hours post the biopsy procedure and the one or more biomarkers are selected from the group consisting of GCSF (CSF3), CXCL1, IL6, IL8, IL4, MDC, IP10, GMCSF (CSF2), MIP1a, TGFa, CCL20, CCL22, CXCL2, CXCL3, CXCLS, CXCL6, IL1B, PTGS2, CCL3, CCL4, CCL8, CFB, MMP3, FDCSP, PTX3, CCL3L3, CXCL8, FGF2, NEFM, TNIP3, MMP10, ADORA2A, DEFB4A, GPR84, AC243829.4, COLQ, TFPI2, SPRR2A, OXTR, CCL4L2, MMP1, TNFAIP6, HMX3, LIF, CD274, AC073862.2, TNFRSF11B, AC003092.1, SALL1, AC084871.4, CD38, NFKBIZ, ZC3H12A, SLC4A4, AL139393.3, MSC, SLC1A2, CCL2, GOS2, SLC34A2, AC073611.1, AC106865.1, AL078604.2, INHBA, LCN2, AC009303.4, TDO2, NGF, IER3, BCL2A1, SOD2, CEMIP, SAA1, TRAF1, GCH1, AC007780.1, AC007998.3, TMC1, GRM1, SPINK6, CD1D, IL17C, AC004264.1, EDNRB, DRAM1, CH25H, FOXD4L1, PTGES, SAA2, SLC39A14, RIPK2, PANX2, HS3ST3B1, IL23A, ROR1-AS1, AP002784.1, TMEM132A, ADAMTSS, OSM, RGS3, BMP6, STC1, SIRPA, RFX8, TMEM158, PAX1, IL24, ODAM, BCAT1, AC099494.2, ZNF697, C2CD4A, CCRL2, LAMA1, LSS, TGFB3, TM4SF1, CCL7, FFAR3, QPCTL, GRAMD1A, DNAJB5, ARSG, NRP2, INSM1, ICAM1, REP15, ACSL4, AC073862.5, LYN, AKR1C1, SDK1, THBS2, IL4I1, PILRA, SLC39A8, NEU4, MT1A, NRIP3, C2CD4B, ASPHD1, SLC11A1, SPRR2B, NFKB2, TNFRSF9, and NKX3-1.

[0325] In one embodiment, the level of CSF3 (GCSF) is measured at least 24 hours post the biopsy procedure. In another embodiment, the level of CXCL1 is measured at least 24 hours post the biopsy procedure. In another embodiment, the level of IL6 is measured at least 24 hours post the biopsy procedure.

[0326] In one embodiment, the levels of CSF3 (GCSF), CXCL1 and IL6 are measured at least 24 hours post the biopsy procedure.

[0327] In one embodiment, the levels of GCSF, CXCL1, IL6 and IL8 are measured at least 24 hours post the biopsy procedure.

[0328] In one embodiment, the levels of CXCL1, GCSF, GMCSF, IL6, IL8, MIP1a and TGFa are measured at least 24 hours post the biopsy procedure.

[0329] In one embodiment, the levels of GCSF, CXCL1, IL4, IL6, IL8, MDC and IP10 are measured at least 24 hours post the biopsy procedure.

[0330] In one embodiment, the levels of GCSF, CXCL1, IL4, IL6, IL8, MDC, IP10, GMCSF, MIP1a and TGFa are measured at least 24 hours post the biopsy procedure.

[0331] In one embodiment, the levels of CCL20, CCL22, CSF3(GCSF), CXCL1, CXCL2, CXCL3, CXCL5, CXCL6, IL6, IL8, PTGS2, CCL3, CCL4, CCL8, CFB, IL1B, and MMP3 are measured at least 24 hours post the biopsy procedure.

[0332] In one embodiment, the levels of CCL20, CCL22, CSF3(GCSF), CXCL1, CXCL2, CXCL3, CXCL5, CXCL6, IL6, IL8, and PTGS2 are measured at least 24 hours post the biopsy procedure.

[0333] In one embodiment, the levels of CCL20, CCL3, CCL4, CCL8, CFB, CSF3(GCSF), CXCL1, CXCL2, CXCL3, CXCL5, IL1B, IL6, IL8, MMP3 are measured at least 24 hours post the biopsy procedure.

[0334] In one embodiment, the levels of CCL20, CSF3(GCSF), CXCL1, CXCL2, CXCL3, CXCL5, IL6, IL8, and PTGS2 are measured at least 24 hours post the biopsy procedure).

[0335] In some embodiments of the various methods provided herein, the level(s) of the one or more biomarker(s) post treatment with the IL1α inhibitor (for example an anti-IL1α antibody, such as bermekimab) is compared with the reference level(s) of the same biomarker(s) from a sample cultured for the same amount of time without the treatment, and compared with another reference level(s) of the same biomarker(s) in a control sample. In some embodiments, the control sample is a positive control using another IL1α inhibitor (for example, the anti-IL1a antibody R&D, clone 4414). In other embodiments, the control sample is a negative control using a compound that is not an IL1α inhibitor. In yet other embodiments, another reference level(s) of the same biomarker(s) in a control sample is the level(s) of the biomarker(s) in a control sample just obtained from the subject, e.g., within 30 mins after obtaining the sample from the subject or within the period before IL1α level is elevated.

[0336] In other embodiments of the various methods provided herein, for each biomarker, four levels of the biomarker are obtained. Specifically, the first level of the biomarker is measured in a sample from a subject without treatment with the IL1α inhibitor (for example an anti-IL1α antibody, such as bermekimab) right after the sample is obtained from the subject (e.g., within 30 mins or before IL1α level is elevated); the second level of the biomarker is measured in a sample from a subject without treatment with the IL1α inhibitor (for example an anti-IL1α antibody, such as bermekimab) after the sample is cultured for a period of time (e.g., after IL1α level would usually elevate); the third level of the biomarker is measured in a sample from a subject with the treatment with the IL1α inhibitor (for example an anti-IL1α antibody, such as bermekimab) right after the sample is obtained from the subject (e.g., within 30 mins or before IL1α level would usually elevate); the fourth level of the biomarker is measured in a sample from a subject with the treatment with the IL1α inhibitor (for example an anti-IL1α antibody, such as bermekimab) after the sample is cultured for a period of time (e.g., after IL1α level would usually elevate without any treatment). In some embodiments, the first level and the second level are measured based on one sample but at different time points after being obtained from the subject. In some embodiments, the third level and the fourth level are measured based on one sample but at different time points after being obtained from the subject.

[0337] In some embodiments of various methods provided herein (including those described above), an inhibitor of IL1α provided herein is administered to a patient that has been determined likely to be responsive to the inhibitor of IL1α. In some embodiments, the IL1α inhibitor is an anti-IL1α antibody, such as bermekimab. So in one aspect, provided herein is a method of selectively treating a subject with a treatment comprising an inhibitor of IL1α (for example an anti-IL1α antibody, such as bermekimab), comprising administering a therapeutically effective amount of the treatment comprising the inhibitor of IL1α (for example an anti-IL1α antibody, such as bermekimab) to the subject identified as being likely to be responsive to the treatment comprising the inhibitor of IL1α (for example an anti-IL1α antibody, such as bermekimab) according to the methods provided herein.

[0338] Also provided herein are methods of treating patients who have been previously treated but are non-responsive to standard therapies, as well as those who have not previously been treated. The disclosure also encompasses methods of treating patients regardless of patient's age, although some diseases or disorders are more common in certain age groups. The disclosure further encompasses methods of treating patients who have undergone surgery in an attempt to treat the disease or condition at issue, as well as those who have not. The treatment given to a patient may vary, depending on his/her prognosis. The skilled clinician will be able to readily determine specific secondary agents, types of surgery, and types of non-drug based standard therapy that can be effectively used to treat an individual patient.

[0339] In some embodiments, the subject has atopic dermatitis, hidradenitis suppurativa, psoriasis, cutaneous lupus erythematosus, or autoimmune bullous disease. In one embodiment, the subject has atopic dermatitis. In another embodiment, the subject has hidradenitis suppurativa.

[0340] In some embodiments, provided herein is a method for predicting or monitoring response to treatment of atopic dermatitis, hidradenitis suppurativa, psoriasis, cutaneous lupus erythematosus, or autoimmune bullous disease. In one embodiment, provided herein is a method for predicting or monitoring response to treatment of atopic dermatitis. In another embodiment, provided herein is a method for predicting or monitoring response to treatment of hidradenitis suppurativa.

[0341] In some embodiments, the method provided herein is for treating atopic dermatitis, hidradenitis suppurativa, psoriasis, cutaneous lupus erythematosus, or autoimmune bullous disease. In one embodiment, the method provided herein is for treating atopic dermatitis. In another embodiment, the method provided herein is for treating hidradenitis suppurativa.

[0342] 5.2.3. Methods for Screening and Identifying IL1α Inhibitors

[0343] In another aspect, provided herein is a method for screening or identifying an agent that is capable of inhibiting IL1α using the biomarkers provided herein.

[0344] In some embodiments, the method comprises providing a sample; contacting the sample with the agent; measuring levels of one or more biomarkers in the sample; determining if the agent is capable of inhibiting IL1α based on the levels of the one or more biomarkers.

[0345] In some embodiments, the sample is obtained by biopsy procedure and contain injured skin cells. In some embodiments, the size of the skin biopsy sample is at least 4 mm. In some embodiments, the size of the skin biopsy sample is about 3.5 mm. In some embodiments, the size of the skin biopsy sample is about 3.6 mm. In some embodiments, the size of the skin biopsy sample is about 3.7 mm. In some embodiments, the size of the skin biopsy sample is about 3.8 mm. In some embodiments, the size of the skin biopsy sample is about 3.9 mm. In some embodiments, the size of the skin biopsy sample is about 4 mm. In some embodiments, the size of the skin biopsy sample is about 4.1 mm. In some embodiments, the size of the skin biopsy sample is about 4.2 mm. In some embodiments, the size of the skin biopsy sample is about 4.3 mm. In some embodiments, the size of the skin biopsy sample is about 4.4 mm. In some embodiments, the size of the skin biopsy sample is about 4.5 mm. In some embodiments, the size of the skin biopsy sample is about 4.6 mm. In some embodiments, the size of the skin biopsy sample is about 4.7 mm. In some embodiments, the size of the skin biopsy sample is about 4.8 mm. In some embodiments, the size of the skin biopsy sample is about 4.8 mm. In some embodiments, the size of the skin biopsy sample is about 4.9 mm. In some embodiments, the size of the skin biopsy sample is about 5.0 mm.

[0346] In one embodiment, the size of the skin sample is at least 4.0 mm. In another embodiment, the size of the skin sample is about 4.0 mm.

[0347] In some embodiments, the biopsy sample obtained from the subject is cultured ex vivo. The agent can be administered to the sample prior to the ex vivo culturing. In some embodiments, the agent can be administered to the sample during the ex vivo culturing. In other embodiments, the sample is cultured ex vivo for a period of time prior to administering to the sample the agent.

[0348] In some embodiments, the levels of the one or more biomarkers provided herein can be measured at a time when IL1α would have been elevated should no inhibitor of IL1α be administrated (e.g., 4 to 24 hours post the biopsy procedure).

[0349] In one embodiment the levels of the one or more biomarkers provided herein are measured in a skin sample at 4 hours post the biopsy procedure. In certain such embodiments, the levels of one or more biomarkers provided herein are measured in a skin sample that has a size of at least 4.0 mm at 4 hours post the biopsy procedure. In other embodiments, the levels of one or more biomarkers provided herein are measured in a skin sample that has a size of about 4.0 mm at 4 hours post the biopsy procedure.

[0350] In another embodiment, the levels of the one or more biomarkers provided herein are measured in a skin sample at 24 hours post the biopsy procedure. In certain such embodiments, the levels of one or more biomarkers provided herein are measured in a skin sample that has a size of at least 4.0 mm at 24 hours post the biopsy procedure. In other embodiments, the levels of one or more biomarkers provided herein are measured in a skin sample that has a size of about 4.0 mm at 24 hours post the biopsy procedure.

[0351] The levels of the one or more biomarkers can be measured at least 4 hours post administration of agent. In some embodiments, the levels of the one or more biomarkers are measured at least 5 hours post administration of the agent. In some embodiments, the levels of the one or more biomarkers are measured at least 6 hours post administration of the agent. In some embodiments, the levels of the one or more biomarkers are measured at least 7 hours post administration of the agent. In some embodiments, the levels of the one or more biomarkers are measured at least 8 hours post administration of the agent. In some embodiments, the levels of the one or more biomarkers are measured at least 9 hours post administration of the agent. In some embodiments, the levels of the one or more biomarkers are measured at least 10 hours post administration of the agent. In some embodiments, the levels of the one or more biomarkers are measured at least 11 hours post administration of the agent. In some embodiments, the levels of the one or more biomarkers are measured at least 12 hours post administration of the agent. In some embodiments, the levels of the one or more biomarkers are measured at least 13 hours post administration of the agent. In some embodiments, the levels of the one or more biomarkers are measured at least 14 hours post administration of the agent. In some embodiments, the levels of the one or more biomarkers are measured at least 15 hours post administration of the agent. In some embodiments, the levels of the one or more biomarkers are measured at least 16 hours post administration of the agent. In some embodiments, the levels of the one or more biomarkers are measured at least 17 hours post administration of the agent. In some embodiments, the levels of the one or more biomarkers are measured at least 18 hours post administration of the agent. In some embodiments, the levels of the one or more biomarkers are measured at least 19 hours post administration of the agent. In some embodiments, the levels of the one or more biomarkers are measured at least 20 hours post administration of the agent. In some embodiments, the levels of the one or more biomarkers are measured at least 21 hours post administration of the agent. In some embodiments, the levels of the one or more biomarkers are measured at least 22 hours post administration of the agent. In some embodiments, the levels of the one or more biomarkers are measured at least 23 hours post administration of the agent. In some embodiments, the levels of the one or more biomarkers are measured at least 24 hours post administration of the agent. In some embodiments, the levels of the one or more biomarkers are measured at least 25 hours post administration of the agent. In some embodiments, the levels of the one or more biomarkers are measured at least 30 hours post administration of the agent.

[0352] In one embodiment, the levels of the one or more biomarkers are measured at least 24 hours post administration of the inhibitor of IL1α (for example, an anti-IL1α antibody, such as bermekimab).

[0353] In certain embodiments, the levels of one or more biomarkers are measured at least 24 hours post administration of the inhibitor of IL1α and the one or more biomarkers are selected from the group consisting of GCSF (CSF3), CXCL1, IL6, IL8, IL4, MDC, IP10, GMCSF (CSF2), MIP1a, TGFa, CCL20, CCL22, CXCL2, CXCL3, CXCLS, CXCL6, IL1B, PTGS2, CCL3, CCL4, CCL8, CFB, MMP3, FDCSP, PTX3, CCL3L3, CXCL8, FGF2, NEFM, TNIP3, MMP10, ADORA2A, DEFB4A, GPR84, AC243829.4, COLQ, TFPI2, SPRR2A, OXTR, CCL4L2, MMP1, TNFAIP6, HMX3, LIF, CD274, AC073862.2, TNFRSF11B, AC003092.1, SALL1, AC084871.4, CD38, NFKBIZ, ZC3H12A, SLC4A4, AL139393.3, MSC, SLC1A2, CCL2, GOS2, SLC34A2, AC073611.1, AC106865.1, AL078604.2, INHBA, LCN2, AC009303.4, TDO2, NGF, IER3, BCL2A1, SOD2, CEMIP, SAA1, TRAF1, GCH1, AC007780.1, AC007998.3, TMC1, GRM1, SPINK6, CD1D, IL17C, AC004264.1, EDNRB, DRAM1, CH25H, FOXD4L1, PTGES, SAA2, SLC39A14, RIPK2, PANX2, HS3ST3B1, IL23A, ROR1-AS1, AP002784.1, TMEM132A, ADAMTSS, OSM, RGS3, BMP6, STC1, SIRPA, RFX8, TMEM158, PAX1, IL24, ODAM, BCAT1, AC099494.2, ZNF697, C2CD4A, CCRL2, LAMA1, LSS, TGFB3, TM4SF1, CCL7, FFAR3, QPCTL, GRAIVID1A, DNAJB5, ARSG, NRP2, INSM1, ICAM1, REP15, ACSL4, AC073862.5, LYN, AKR1C1, SDK1, THBS2, IL4I1, PILRA, SLC39A8, NEU4, MT1A, NRIP3, C2CD4B, ASPHD1, SLC11A1, SPRR2B, NFKB2, TNFRSF9, and NKX3-1.

[0354] In one embodiment, the level of CSF3 (GCSF) is measured at least 24 hours post administration of the inhibitor of IL1α (for example, an anti-IL1α antibody, such as bermekimab). In another embodiment, the level of CXCL1 is measured at least 24 hours post administration of the inhibitor of IL1α (for example, an anti-IL1α antibody, such as bermekimab). In another embodiment, the level of IL6 is measured at least 24 hours post administration of the inhibitor of IL1α (for example, an anti-IL1α antibody, such as bermekimab).

[0355] In one embodiment, the levels of CSF3 (GCSF), CXCL1 and IL6 are measured at least 24 hours post administration of the inhibitor of IL1α (for example, an anti-IL1α antibody, such as bermekimab).

[0356] In one embodiment, the levels of GCSF, CXCL1, IL6 and IL8 are measured at least 24 hours post administration of the inhibitor of IL1α (for example, an anti-IL1α antibody, such as bermekimab).

[0357] In one embodiment, the levels of CXCL1, GCSF, GMCSF, IL6, IL8, MIP1a and TGFa are measured at least 24 hours post administration of the inhibitor of IL1α (for example, an anti-IL1α antibody, such as bermekimab).

[0358] In one embodiment, the levels of GCSF, CXCL1, IL4, IL6, IL8, MDC and IP10 are measured at least 24 hours post administration of the inhibitor of IL1α (for example, an anti-IL1α antibody, such as bermekimab).

[0359] In one embodiment, the levels of GCSF, CXCL1, IL4, IL6, IL8, MDC, IP10, GMCSF, MIP1a and TGFa are measured at least 24 hours post administration of the inhibitor of IL1α (for example, an anti-IL1α antibody, such as bermekimab).

[0360] In one embodiment, the levels of CCL20, CCL22, CSF3(GCSF), CXCL1, CXCL2, CXCL3, CXCL5, CXCL6, IL6, IL8, PTGS2, CCL3, CCL4, CCL8, CFB, IL1B, and MMP3 are measured at least 24 hours post administration of the inhibitor of IL1α (for example, an anti-IL1α antibody, such as bermekimab).

[0361] In one embodiment, the levels of CCL20, CCL22, CSF3(GCSF), CXCL1, CXCL2, CXCL3, CXCL5, CXCL6, IL6, IL8, and PTGS2 are measured at least 24 hours post administration of the inhibitor of IL1α (for example, an anti-IL1α antibody, such as bermekimab).

[0362] In one embodiment, the levels of CCL20, CCL3, CCL4, CCL8, CFB, CSF3(GCSF), CXCL1, CXCL2, CXCL3, CXCL5, IL1B, IL6, IL8, MMP3 are measured at least 24 hours post administration of the inhibitor of IL1α (for example, an anti-IL1α antibody, such as bermekimab).

[0363] In one embodiment, the levels of CCL20, CSF3(GCSF), CXCL1, CXCL2, CXCL3, CXCL5, IL6, IL8, and PTGS2 are measured at least 24 hours post administration of the inhibitor of IL1α (for example, an anti-IL1α antibody, such as bermekimab).

[0364] In some embodiments, the levels of the one or more biomarkers are measured at least 4 hours post the biopsy procedure. In some embodiments, the levels of the one or more biomarkers are measured at least 5 hours post the biopsy procedure. In some embodiments, the levels of the one or more biomarkers are measured at least 6 hours post the biopsy procedure. In some embodiments, the levels of the one or more biomarkers are measured at least 7 hours post the biopsy procedure. In some embodiments, the levels of the one or more biomarkers are measured at least 8 hours post the biopsy procedure. In some embodiments, the levels of the one or more biomarkers are measured at least 9 hours post the biopsy procedure. In some embodiments, the levels of the one or more biomarkers are measured at least 10 hours post the biopsy procedure. In some embodiments, the levels of the one or more biomarkers are measured at least 11 hours post the biopsy procedure. In some embodiments, the levels of the one or more biomarkers are measured at least 12 hours post the biopsy procedure. In some embodiments, the levels of the one or more biomarkers are measured at least 13 hours post the biopsy procedure. In some embodiments, the levels of the one or more biomarkers are measured at least 14 hours post the biopsy procedure. In some embodiments, the levels of the one or more biomarkers are measured at least 15 hours post the biopsy procedure. In some embodiments, the levels of the one or more biomarkers are measured at least 16 hours post the biopsy procedure. In some embodiments, the levels of the one or more biomarkers are measured at least 17 hours post the biopsy procedure. In some embodiments, the levels of the one or more biomarkers are measured at least 18 hours post the biopsy procedure. In some embodiments, the levels of the one or more biomarkers are measured at least 19 hours post the biopsy procedure. In some embodiments, the levels of the one or more biomarkers are measured at least 20 hours post the biopsy procedure. In some embodiments, the levels of the one or more biomarkers are measured at least 21 hours post the biopsy procedure. In some embodiments, the levels of the one or more biomarkers are measured at least 22 hours post the biopsy procedure. In some embodiments, the levels of the one or more biomarkers are measured at least 23 hours post the biopsy procedure. In some embodiments, the levels of the one or more biomarkers are measured at least 24 hours post the biopsy procedure. In some embodiments, the levels of the one or more biomarkers are measured at least 25 hours post the biopsy procedure. In some embodiments, the levels of the one or more biomarkers are measured at least 30 hours post the biopsy procedure.

[0365] In one embodiment, the levels of the one or more biomarkers are measured at least 24 hours post the biopsy procedure.

[0366] In certain embodiments, the levels of one or more biomarkers are measured at least 24 hours post the biopsy procedure and the one or more biomarkers are selected from the group consisting of GCSF (CSF3), CXCL1, IL6, IL8, IL4, MDC, IP10, GMCSF (CSF2), MIP1a, TGFa, CCL20, CCL22, CXCL2, CXCL3, CXCL5, CXCL6, IL1B, PTGS2, CCL3, CCL4, CCL8, CFB, MMP3, FDCSP, PTX3, CCL3L3, CXCL8, FGF2, NEFM, TNIP3, MMP10, ADORA2A, DEFB4A, GPR84, AC243829.4, COLQ, TFPI2, SPRR2A, OXTR, CCL4L2, MMP1, TNFAIP6, HMX3, LIF, CD274, AC073862.2, TNFRSF11B, AC003092.1, SALL1, AC084871.4, CD38, NFKBIZ, ZC3H12A, SLC4A4, AL139393.3, MSC, SLC1A2, CCL2, GOS2, SLC34A2, AC073611.1, AC106865.1, AL078604.2, INHBA, LCN2, AC009303.4, TDO2, NGF, IER3, BCL2A1, SOD2, CEMIP, SAA1, TRAF1, GCH1, AC007780.1, AC007998.3, TMC1, GRM1, SPINK6, CD1D, IL17C, AC004264.1, EDNRB, DRAM1, CH25H, FOXD4L1, PTGES, SAA2, SLC39A14, RIPK2, PANX2, HS3ST3B1, IL23A, ROR1-AS1, AP002784.1, TMEM132A, ADAMTS5, OSM, RGS3, BMP6, STC1, SIRPA, RFX8, TMEM158, PAX1, IL24, ODAM, BCAT1, AC099494.2, ZNF697, C2CD4A, CCRL2, LAMA1, LSS, TGFB3, TM4SF1, CCL7, FFAR3, QPCTL, GRAMD1A, DNAJB5, ARSG, NRP2, INSM1, ICAM1, REP15, ACSL4, AC073862.5, LYN, AKR1C1, SDK1, THBS2, IL4I1, PILRA, SLC39A8, NEU4, MT1A, NRIP3, C2CD4B, ASPHD1, SLC11A1, SPRR2B, NFKB2, TNFRSF9, and NKX3-1.

[0367] In one embodiment, the level of CSF3 (GCSF) is measured at least 24 hours post the biopsy procedure. In another embodiment, the level of CXCL1 is measured at least 24 hours post the biopsy procedure. In another embodiment, the level of IL6 is measured at least 24 hours post the biopsy procedure.

[0368] In one embodiment, the levels of CSF3 (GCSF), CXCL1 and IL6 are measured at least 24 hours post the biopsy procedure.

[0369] In one embodiment, the levels of GCSF, CXCL1, IL6 and IL8 are measured at least 24 hours post the biopsy procedure.

[0370] In one embodiment, the levels of CXCL1, GCSF, GMCSF, IL6, IL8, MIP1a and TGFa are measured at least 24 hours post the biopsy procedure.

[0371] In one embodiment, the levels of GCSF, CXCL1, IL4, IL6, IL8, MDC and IP10 are measured at least 24 hours post the biopsy procedure.

[0372] In one embodiment, the levels of GCSF, CXCL1, IL4, IL6, IL8, MDC, IP10, GMCSF, MIP1a and TGFa are measured at least 24 hours post the biopsy procedure.

[0373] In one embodiment, the levels of CCL20, CCL22, CSF3(GCSF), CXCL1, CXCL2, CXCL3, CXCL5, CXCL6, IL6, IL8, PTGS2, CCL3, CCL4, CCL8, CFB, IL1B, and MMP3 are measured at least 24 hours post the biopsy procedure.

[0374] In one embodiment, the levels of CCL20, CCL22, CSF3(GCSF), CXCL1, CXCL2, CXCL3, CXCL5, CXCL6, IL6, IL8, and PTGS2 are measured at least 24 hours post the biopsy procedure.

[0375] In one embodiment, the levels of CCL20, CCL3, CCL4, CCL8, CFB, CSF3(GCSF), CXCL1, CXCL2, CXCL3, CXCL5, IL1B, IL6, IL8, MMP3 are measured at least 24 hours post the biopsy procedure.

[0376] In one embodiment, the levels of CCL20, CSF3(GCSF), CXCL1, CXCL2, CXCL3, CXCL5, IL6, IL8, and PTGS2 are measured at least 24 hours post the biopsy procedure.

[0377] The effects of the agent can be determined by comparing the levels of the one or more biomarkers provided herein with reference levels of these biomarkers.

[0378] The reference levels of these biomarkers can be the levels of these biomarkers in a reference injured skin sample (for example, a skin biopsy sample) without any influence by an inhibitor of IL1α (for example an anti-IL1α antibody, such as bermekimab), and the levels of the biomarkers in the sample and the levels of the biomarkers in the reference sample are measured at the same time point (for example, at least 4 hours or at least 24 hours post the biopsy procedure).

[0379] In some embodiments, the reference levels of the one or more biomarkers are the levels of the one or more biomarkers in a reference sample from the subject prior to administration of an inhibitor of IL1α. In some embodiments, the reference levels of the one or more biomarkers are the levels of the one or more biomarkers in a reference sample from the subject without administration of an inhibitor of IL1α. In some embodiments, the reference levels of the one or more biomarkers are pre-determined levels of the one or more biomarkers. In some embodiments, the reference levels of the one or more biomarkers are the levels of the one or more biomarkers in a reference sample administered with a control agent (e.g., a positive control agent that inhibits IL1α, such as the anti-IL1α antibody R&D, clone 4414, or a negative control agent that does not inhibit IL1α).

[0380] In one embodiment, the reference levels of the one or more biomarkers are the levels of the one or more biomarkers in a reference skin biopsy sample from the subject without administration of the inhibitor of IL1α, and the levels of the biomarkers in the sample and the levels of the biomarkers in the reference sample are measured at the same time point.

[0381] When the levels of the biomarkers are compared to the reference levels that represent the elevated levels of these biomarkers post injury (e.g. biopsy induced injury) but without the influence of an inhibitor of IL1α, the lower levels of the one or more biomarkers as compared with the references indicate that the agent is capable of inhibiting IL1α.

[0382] In some embodiments, the agent is identified as capable of inhibiting IL1α if the levels of the one or more biomarkers in the sample at least 20%, are at least 30%, at least 35%, at least 40%, or at least 50% less than the reference levels.

[0383] In one embodiment, the agent is identified as capable of inhibiting IL1α if the levels of the one or more cytokine biomarkers secreted by the sample (for example, as measured by a Luminex assay) are at least 50% less than the reference levels. In another embodiment, the agent is identified as capable of inhibiting IL1α if the mRNA levels (for example, as measured by a Nanostring assay) of the one or more biomarkers in the sample are at least 30% less than the reference levels. In another embodiment, the agent is identified as capable of inhibiting IL1α if the mRNA levels (for example, as measured by an RNAseq assay) of the one or more biomarkers in the sample are at least 20% less than the reference levels.

[0384] In some embodiments, the levels of the one or more biomarkers are the expression levels of one or more biomarkers selected from a group consisting of GCSF (CSF3), CXCL1, IL6, IL8, IL4, MDC, IP10, GMCSF (CSF2), MIP1a, TGFa, CCL20, CCL22, CXCL2, CXCL3, CXCLS, CXCL6, IL1B, PTGS2, CCL3, CCL4, CCL8, CFB, MMP3, FDCSP, PTX3, CCL3L3, CXCL8, FGF2, NEFM, TNIP3, MMP10, ADORA2A, DEFB4A, GPR84, AC243829.4, COLQ, TFPI2, SPRR2A, OXTR, CCL4L2, MMP1, TNFAIP6, HMX3, LIF, CD274, AC073862.2, TNFRSF11B, AC003092.1, SALL1, AC084871.4, CD38, NFKBIZ, ZC3H12A, SLC4A4, AL139393.3, MSC, SLC1A2, CCL2, GOS2, SLC34A2, AC073611.1, AC106865.1, AL078604.2, INHBA, LCN2, AC009303.4, TDO2, NGF, IER3, BCL2A1, SOD2, CEMIP, SAA1, TRAF1, GCH1, AC007780.1, AC007998.3, TMC1, GRM1, SPINK6, CD1D, IL17C, AC004264.1, EDNRB, DRAM1, CH25H, FOXD4L1, PTGES, SAA2, SLC39A14, RIPK2, PANX2, HS3ST3B1, IL23A, ROR1-AS1, AP002784.1, TMEM132A, ADAMTS5, OSM, RGS3, BMP6, STC1, SIRPA, RFX8, TMEM158, PAX1, IL24, ODAM, BCAT1, AC099494.2, ZNF697, C2CD4A, CCRL2, LAMA1, LSS, TGFB3, TM4SF1, CCL7, FFAR3, QPCTL, GRAMD1A, DNAJB5, ARSG, NRP2, INSM1, ICAM1, REP15, ACSL4, AC073862.5, LYN, AKR1C1, SDK1, THBS2, IL4I1, PILRA, SLC39A8, NEU4, MT1A, NRIP3, C2CD4B, ASPHD1, SLC11A1, SPRR2B, NFKB2, TNFRSF9, and NKX3-1.

[0385] In some embodiments, the levels of the one or more biomarkers are the expression levels of one or more biomarkers selected from a group consisting of GCSF (CSF3), CXCL1, IL6, GMCSF (CSF2), CCL20, CCL22, CXCL2, CXCL3, CXCL5, IL1B, PTGS2, CCL3, CCL4, CCL8, CFB, MMP3, FDCSP, PTX3, CCL3L3, CXCL8, FGF2, NEFM, TNIP3, MMP10, ADORA2A, DEFB4A, GPR84, AC243829.4, COLQ, TFPI2, SPRR2A, OXTR, CCL4L2, MMP1, TNFAIP6, HMX3, LIF, CD274, AC073862.2, TNFRSF11B, AC003092.1, SALL1, AC084871.4, CD38, NFKBIZ, ZC3H12A, SLC4A4, AL139393.3, MSC, SLC1A2, CCL2, GOS2, SLC34A2, AC073611.1, AC106865.1, AL078604.2, INHBA, LCN2, AC009303.4, TDO2, NGF, IER3, BCL2A1, SOD2, CEMIP, SAA1, TRAF1, GCH1, AC007780.1, AC007998.3, TMC1, GRM1, SPINK6, CD1D, IL17C, AC004264.1, EDNRB, DRAM1, CH25H, FOXD4L1, PTGES, SAA2, SLC39A14, RIPK2, PANX2, HS3ST3B1, IL23A, ROR1-AS1, AP002784.1, TMEM132A, ADAMTS5, OSM, RGS3, BMP6, STC1, SIRPA, RFX8, TMEM158, PAX1, IL24, ODAM, BCAT1, AC099494.2, ZNF697, C2CD4A, CCRL2, LAMA1, LSS, TGFB3, TM4SF1, CCL7, FFAR3, QPCTL, GRAMD1A, DNAJB5, ARSG, NRP2, INSM1, ICAM1, REP15, ACSL4, AC073862.5, LYN, AKR1C1, SDK1, THBS2, IL4I1, PILRA, SLC39A8, NEU4, MT1A, NRIP3, C2CD4B, ASPHD1, SLC11A1, SPRR2B, NFKB2, TNFRSF9, and NKX3-1.

[0386] In some embodiments, the levels of the one or more biomarkers are the expression levels of one or more biomarkers selected from a group consisting of CCL20, CCL22, CSF3(GCSF), CXCL1, CXCL2, CXCL3, CXCL5, CXCL6, IL6, IL8, PTGS2, CCL3, CCL4, CCL8, CFB, IL1B, and MMP3.

[0387] In some embodiments, the levels of the one or more biomarkers are the expression levels of one or more biomarkers selected from a group consisting of CCL20, CCL22, CSF3(GCSF), CXCL1, CXCL2, CXCL3, CXCL5, CXCL6, IL6, IL8, and PTGS2. In other embodiments, the levels of the one or more biomarkers are the expression levels of one or more biomarkers selected from a group consisting of CCL20, CCL3, CCL4, CCL8, CFB, CSF3(GCSF), CXCL1, CXCL2, CXCL3, CXCL5, IL1B, IL6, IL8, MMP3, and PTGS2.

[0388] In some embodiments, the one or more biomarkers comprises CCL20. In some embodiments, the one or more biomarkers comprises CCL22. In some embodiments, the one or more biomarkers comprises CSF3. In other embodiments, the one or more biomarkers comprises CXCL1. In other embodiments, the one or more biomarkers comprises CXCL2. In other embodiments, the one or more biomarkers comprises CXCL3. In other embodiments, the one or more biomarkers comprises CXCL5. In other embodiments, the one or more biomarkers comprises CXCL6. In yet other embodiments, the one or more biomarkers comprises IL6. In yet other embodiments, the one or more biomarkers comprises IL8. In yet other embodiments, the one or more biomarkers comprises PTGS2. In yet other embodiments, the one or more biomarkers comprises CCL3. In yet other embodiments, the one or more biomarkers comprises CCL4. In yet other embodiments, the one or more biomarkers comprises CCL8. In yet other embodiments, the one or more biomarkers comprises CFB. In yet other embodiments, the one or more biomarkers comprises IL1B. In yet other embodiments, the one or more biomarkers comprises MMP3.

[0389] In one embodiment, the one or more biomarkers comprise CSF3 (GCSF). In another embodiment, the one or more biomarkers comprise CXCL1. In another embodiment, the one or more biomarkers comprise IL6.

[0390] In some embodiments, the method provided herein comprises measuring all of GCSF (CSF3), CXCL1, IL6, IL8, IL4, MDC, IP10, GMCSF (CSF2), MIP1a, TGFa, CCL20, CCL22, CXCL2, CXCL3, CXCL5, CXCL6, IL1B, PTGS2, CCL3, CCL4, CCL8, CFB, MMP3, FDCSP, PTX3, CCL3L3, CXCL8, FGF2, NEFM, TNIP3, MMP10, ADORA2A, DEFB4A, GPR84, AC243829.4, COLQ, TFPI2, SPRR2A, OXTR, CCL4L2, MMP1, TNFAIP6, HMX3, LIF, CD274, AC073862.2, TNFRSF11B, AC003092.1, SALL1, AC084871.4, CD38, NFKBIZ, ZC3H12A, SLC4A4, AL139393.3, MSC, SLC1A2, CCL2, GOS2, SLC34A2, AC073611.1, AC106865.1, AL078604.2, INHBA, LCN2, AC009303.4, TDO2, NGF, IER3, BCL2A1, SOD2, CEMIP, SAA1, TRAF1, GCH1, AC007780.1, AC007998.3, TMC1, GRM1, SPINK6, CD1D, IL17C, AC004264.1, EDNRB, DRAM1, CH25H, FOXD4L1, PTGES, SAA2, SLC39A14, RIPK2, PANX2, HS3ST3B1, IL23A, ROR1-AS1, AP002784.1, TMEM132A, ADAMTS5, OSM, RGS3, BMP6, STC1, SIRPA, RFX8, TMEM158, PAX1, IL24, ODAM, BCAT1, AC099494.2, ZNF697, C2CD4A, CCRL2, LAMA1, LSS, TGFB3, TM4SF1, CCL7, FFAR3, QPCTL, GRAMD1A, DNAJB5, ARSG, NRP2, INSM1, ICAM1, REP15, ACSL4, AC073862.5, LYN, AKR1C1, SDK1, THBS2, IL4I1, PILRA, SLC39A8, NEU4, MT1A, NRIP3, C2CD4B, ASPHD1, SLC11A1, SPRR2B, NFKB2, TNFRSF9, and NKX3-1.

[0391] In some embodiments, the method provided herein comprises measuring all of GCSF (CSF3), CXCL1, IL6, GMCSF (CSF2), CCL20, CCL22, CXCL2, CXCL3, CXCL5, IL1B, PTGS2, CCL3, CCL4, CCL8, CFB, MMP3, FDCSP, PTX3, CCL3L3, CXCL8, FGF2, NEFM, TNIP3, MMP10, ADORA2A, DEFB4A, GPR84, AC243829.4, COLQ, TFPI2, SPRR2A, OXTR, CCL4L2, MMP1, TNFAIP6, HMX3, LIF, CD274, AC073862.2, TNFRSF11B, AC003092.1, SALL1, AC084871.4, CD38, NFKBIZ, ZC3H12A, SLC4A4, AL139393.3, MSC, SLC1A2, CCL2, GOS2, SLC34A2, AC073611.1, AC106865.1, AL078604.2, INHBA, LCN2, AC009303.4, TDO2, NGF, IER3, BCL2A1, SOD2, CEMIP, SAA1, TRAF1, GCH1, AC007780.1, AC007998.3, TMC1, GRM1, SPINK6, CD1D, IL17C, AC004264.1, EDNRB, DRAM1, CH25H, FOXD4L1, PTGES, SAA2, SLC39A14, RIPK2, PANX2, HS3ST3B1, IL23A, ROR1-AS1, AP002784.1, TMEM132A, ADAMTS5, OSM, RGS3, BMP6, STC1, SIRPA, RFX8, TMEM158, PAX1, IL24, ODAM, BCAT1, AC099494.2, ZNF697, C2CD4A, CCRL2, LAMA1, LSS, TGFB3, TM4SF1, CCL7, FFAR3, QPCTL, GRAMD1A, DNAJB5, ARSG, NRP2, INSM1, ICAM1, REP15, ACSL4, AC073862.5, LYN, AKR1C1, SDK1, THBS2, IL4I1, PILRA, SLC39A8, NEU4, MT1A, NRIP3, C2CD4B, ASPHD1, SLC11A1, SPRR2B, NFKB2, TNFRSF9, and NKX3-1.

[0392] In some embodiments, the method provided herein comprises measuring all of CCL20, CCL22, CSF3(GCSF), CXCL1, CXCL2, CXCL3, CXCL5, CXCL6, IL6, IL8, PTGS2, CCL3, CCL4, CCL8, CFB, IL1B, and MMP3. Totality of the expression levels of these biomarkers is used to determine the effects of the inhibitor. Any classification methods or algorithms useful for comparing the totality of the expressions of these biomarkers with a reference are included herein. For example, a composite score based on the expression levels of these biomarkers can be used. In some instances a composite score may be calculated based on the geometric mean of the expression levels of these biomarkers. A composite score based on comparing the expression levels of these biomarkers with and without treatment may be used. In some instances, a composite score may be calculated using the average of percentage of reduction on the expression levels (following treatment) of these biomarkers. This approach may allow variations of individual gene expression in different subjects. Similarly, this method also applies to a subset including 2 or more biomarkers selected from CCL20, CCL22, CSF3(GCSF), CXCL1, CXCL2, CXCL3, CXCL5, CXCL6, IL6, IL8, PTGS2, CCL3, CCL4, CCL8, CFB, IL1B, and MMP3

[0393] In some embodiments, the one or more biomarkers are CCL20, CCL22, CSF3(GCSF), CXCL1, CXCL2, CXCL3, CXCL5, CXCL6, IL6, IL8, and PTGS2. In some embodiments, a composite score is calculated based on the levels of CCL20, CCL22, CSF3, CXCL1, CXCL2, CXCL3, CXCL5, CXCL6, IL6, IL8, and PTGS2, and wherein the method further comprises comparing the composite score to a reference score.

[0394] In other embodiments, the one or more biomarkers are CCL20, CCL3, CCL4, CCL8, CFB, CSF3(GCSF), CXCL1, CXCL2, CXCL3, CXCL5, IL1B, IL6, IL8, MMP3, and PTGS2. In some embodiments, a composite score is calculated based on the levels of CCL20, CCL3, CCL4, CCL8, CFB, CSF3(GCSF), CXCL1, CXCL2, CXCL3, CXCL5, IL1B, IL6, IL8, MMP3, and PTGS2, and wherein the method further comprises comparing the composite score to a reference score.

[0395] In other embodiments, the one or more biomarkers are CCL20, CSF3(GCSF), CXCL1, CXCL2, CXCL3, CXCL5, IL6, IL8, and PTGS2. In some embodiments, a composite score is calculated based on the levels of CCL20, CSF3(GCSF), CXCL1, CXCL2, CXCL3, CXCL5, IL6, IL8, and PTGS2, and wherein the method further comprises comparing the composite score to a reference score.

[0396] In other embodiments, the one or more biomarkers are CSF3 (GCSF), CXCL1 and IL6. In some embodiments, a composite score is calculated based on the levels of CSF3 (GCSF), CXCL1 and IL6, and wherein the method further comprises comparing the composite score to a reference score.

[0397] The levels of the biomarkers provided herein can be measured by determining protein levels or nucleic acid levels (e.g., mRNA, DNA or cDNA levels) of these biomarkers. In one embodiment, the levels of the biomarkes provided herein are measured by determining protein levels of these biomarkers. In another embodiment, the levels of the biomarkers provided herein are measured by determining mRNA levels of these biomarkers. Detailed description of these measurement methods are provided in the following sections.

[0398] In some embodiments, the levels of the one or more biomarkers are the levels of cytokines secreted by the sample selected from a group consisting of GCSF, CXCL1, IL4, IL6, IL8, MDC, IP10, GMCSF, MIP1a and TGFa.

[0399] In some embodiments, the levels of the one or more biomarkers are the levels of cytokines secreted by the sample selected from a group consisting of GCSF, CXCL1, IL4, IL6, IL8, MDC and IP10.

[0400] In some embodiments, the levels of the one or more biomarkers are the levels of cytokines secreted by the sample selected from a group consisting of CXCL1, GCSF, GMCSF, IL6, IL8, MIP1a and TGFa.

[0401] In some embodiments, the one or more biomarkers comprises GCSF. In some embodiments, the one or more biomarkers comprises CXCL1. In other embodiments, the one or more biomarkers comprises IL4. In other embodiments, the one or more biomarkers comprises IL6. In other embodiments, the one or more biomarkers comprises IL8. In other embodiments, the one or more biomarkers comprises MDC. In other embodiments, the one or more biomarkers comprises IP10. In other embodiments, the one or more biomarkers comprises GMCSF. In other embodiments, the one or more biomarkers comprises MIP1a. In other embodiments, the one or more biomarkers comprises TGFa.

[0402] In some embodiments, the method provided herein comprises measuring all of GCSF, CXCL1, IL4, IL6, IL8, MDC, IP10, GMCSF, MIP1a and TGFa. Totality of the expression levels of these biomarkers is used to determine the effects of the inhibitor. Any classification methods or algorithms useful for comparing the totality of the expressions of these biomarkers with a reference are included herein. For example, a composite score based on the expression levels of these biomarkers can be used. In some instances a composite score may be calculated based on the geometric mean of the expression levels of these biomarkers. A composite score based on comparing the expression levels of these biomarkers with and without treatment may be used. In some instances, a composite score may be calculated using the average of percentage of reduction on the expression levels (following treatment) of these biomarkers. Similarly, this method also applies to a subset including 2 or more biomarkers selected from GCSF, CXCL1, IL4, IL6, IL8, MDC, IP10, GMCSF, MIP1a and TGFa.

[0403] In some embodiments, the one or more biomarkers are GCSF, CXCL1, IL4, IL6, IL8, MDC and IP10. In some embodiments, a composite score is calculated based on the levels of GCSF, CXCL1, IL4, IL6, IL8, MDC and IP10, and wherein the method further comprises comparing the composite score to a reference score.

[0404] In some embodiments, the one or more biomarkers are CXCL1, GCSF, GMCSF, IL6, IL8, MIP1a and TGFa. In some embodiments, a composite score is calculated based on the levels of CXCL1, GCSF, GMCSF, IL6, IL8, MIP1a and TGFa, and wherein the method further comprises comparing the composite score to a reference score.

[0405] In some embodiments, the one or more biomarkers are GCSF, CXCL1, IL6 and IL8. In some embodiments, a composite score is calculated based on the levels of GCSF, CXCL1, IL6 and IL8, and wherein the method further comprises comparing the composite score to a reference score.

[0406] In some embodiments, the one or more biomarkers are CSF3 (GCSF), CXCL1 and IL6. In some embodiments, a composite score is calculated based on the levels of CSF3 (GCSF), CXCL1 and IL6, and wherein the method further comprises comparing the composite score to a reference score.

[0407] In some embodiments, the levels of the biomarkers provided herein can be measured by determining protein levels of these biomarkers. Detailed description of these measurement methods are provided in the following sections.

[0408] The agent identified as capable of inhibiting IL1α can be subject to further validation tests, e.g., to evaluate its biological or other properties.

[0409] In another aspect, provided herein is a composition comprising an agent identified according to the methods provided herein and use of this composition for treating a disease or disorder. In some embodiments, the disease or disorder is selected from the group consisting of atopic dermatitis, hidradenitis suppurativa, psoriasis, cutaneous lupus erythematosus, or autoimmune bullous disease.

[0410] In one embodiment, the disease or disorder is atopic dermatitis. In another embodiment, the disease or disorder is hidradenitis suppurativa.

[0411] 5.3. Subjects, Samples, and Types of Cells

[0412] In certain embodiments, the various methods provided herein use samples (e.g., biological samples) from subjects or individuals (e.g., patients). The subject can be a healthy subject. The subject can be a patient. The subject can be a mammal, for example, a human. The subject can be male or female, and can be an adult, a child, or an infant. In certain embodiments, more than one sample from a subject can be obtained.

[0413] In some embodiments, the sample used in the present methods comprises a biopsy (e.g., a skin biopsy). The biopsy can be from any organ or tissue, for example, skin, liver, lung, heart, colon, kidney, bone marrow, teeth, lymph node, hair, spleen, brain, breast, or other organs. Any biopsy technique known by those skilled in the art can be used for isolating a sample from a subject, for instance, open biopsy, close biopsy, core biopsy, incisional biopsy, excisional biopsy, or fine needle aspiration biopsy.

[0414] In some embodiments, the biopsy sample is about 3 mm to 20 mm. In some embodiments, the biopsy sample is about 3 mm to 10 mm. In other embodiments, the biopsy sample is 3 mm to 5 mm. In a specific embodiment, the biopsy sample is a skin biopsy sample of about 4 mm.

[0415] In certain embodiments, the sample used in the methods provided herein comprises body fluids from a subject. Non-limiting examples of body fluids include blood (e.g., whole blood), blood plasma, amniotic fluid, aqueous humor, bile, cerumen, cowper's fluid, pre-ejaculatory fluid, chyle, chyme, female ejaculate, interstitial fluid, lymph, menses, breast milk, mucus, pleural fluid, pus, saliva, sebum, semen, serum, sweat, tears, urine, vaginal lubrication, vomit, water, feces, internal body fluids (including cerebrospinal fluid surrounding the brain and the spinal cord), synovial fluid, intracellular fluid (the fluid inside cells), and vitreous humour (the fluid in the eyeball). In some embodiments, the sample is a blood sample. The blood sample can be obtained using conventional techniques as described in, e.g., Innis et al, eds., PCR Protocols (Academic Press, 1990). White blood cells can be separated from blood samples using conventional techniques or commercially available kits, e.g., RosetteSep kit (Stein Cell Technologies, Vancouver, Canada). Sub-populations of white blood cells, e.g., mononuclear cells, B cells, T cells, monocytes, granulocytes, or lymphocytes, can be further isolated using conventional techniques, e.g., magnetically activated cell sorting (MACS) (Miltenyi Biotec, Auburn, Calif.) or fluorescently activated cell sorting (FACS) (Becton Dickinson, San Jose, Calif.).

[0416] In one embodiment, the blood sample is from about 0.1 mL to about 10.0 mL, from about 0.2 mL to about 7 mL, from about 0.3 mL to about 5 mL, from about 0.4 mL to about 3.5 mL, or from about 0.5 mL to about 3 mL. In another embodiment, the blood sample is about 0.3, about 0.4, about 0.5, about 0.6, about 0.7, about 0.8, about 0.9, about 1.0, about 1.5, about 2.0, about 2.5, about 3.0, about 3.5, about 4.0, about 4.5, about 5.0, about 6.0, about 7.0, about 8.0, about 9.0, or about 10.0 mL.

[0417] In one embodiment, the sample used in the methods provided herein is obtained from the subject prior to the subject receiving a treatment. In another embodiment, the sample is obtained from the subject during the subject receiving a treatment. In another embodiment, the sample is obtained from the subject after the subject receiving a treatment. In various embodiments, the treatment comprises administering a compound (e.g., an IL1α inhibitor, such as anti-IL1α antibody, for instance bermekimab) to the subject.

[0418] In certain embodiments, the sample used in the methods provided herein comprises a plurality of cells, such as skin cells.

[0419] In certain embodiments, the number of cells used in the methods provided herein can range from a single cell to about 10⁹ cells. In some embodiments, the number of cells used in the methods provided herein is about 1×10⁴, about 5×10⁴, about 1×10⁵, about 5×10⁵, about 1×10⁶, about 5×10⁶, about 1×10′, about 5×10′, about 1×10⁸, about 5×10⁸, or about 1×10⁹.

[0420] The number and type of cells collected from a subject can be monitored, for example, by measuring changes in cell surface markers using standard cell detection techniques such as flow cytometry, cell sorting, immunocytochemistry (e.g., staining with tissue specific or cell-marker specific antibodies), fluorescence activated cell sorting (FACS), magnetic activated cell sorting (MACS), by examining the morphology of cells using light or confocal microscopy, and/or by measuring changes in gene expression using techniques well known in the art, such as PCR and gene expression profiling. These techniques can be used, too, to identify cells that are positive for one or more particular markers.

[0421] In certain embodiments, subsets of cells are used in the methods provided herein. Methods of sorting and isolating specific populations of cells are well-known in the art and can be based on cell size, morphology, or intracellular or extracellular markers. Such methods include, but are not limited to, flow cytometry, flow sorting, FACS, bead based separation such as magnetic cell sorting, size-based separation (e.g., a sieve, an array of obstacles, or a filter), sorting in a microfluidics device, antibody-based separation, sedimentation, affinity adsorption, affinity extraction, density gradient centrifugation, laser capture microdissection, etc. FACS is a well-known method for separating particles, including cells, based on the fluorescent properties of the particles (Kamarch, Methods Enzymol. 1987, 151:150-165). Laser excitation of fluorescent moieties in the individual particles results in a small electrical charge allowing electromagnetic separation of positive and negative particles from a mixture. In one embodiment, cell surface marker-specific antibodies or ligands are labeled with distinct fluorescent labels. Cells are processed through the cell sorter, allowing separation of cells based on their ability to bind to the antibodies used. FACS sorted particles may be directly deposited into individual wells of 96-well or 384-well plates to facilitate separation and cloning.

[0422] In one embodiment, RNA (e.g., mRNA) or protein is purified from a population of cells, and the level of a gene set is measured by mRNA or protein expression analysis. In certain embodiments, the level of a gene set is measured by transcriptomic profiling, qRT-PCR, microarray, high throughput sequencing, or other similar methods known in the art. In other embodiments, the level of a gene set is measured by ELISA, flow cytometry, immunofluorescence, or other similar methods known in the art and described in more detail below.

[0423] In some embodiments of various methods provided herein, a subject is a healthy subject. In other embodiments, the subject is a patient, e.g., having atopic dermatitis, hidradenitis suppurativa, psoriasis, cutaneous lupus erythematosus, or autoimmune bullous disease. In one embodiment, the patient is a subject having atopic dermatitis. In another embodiment, the patient is a subject having hidradenitis suppurativa.

[0424] 5.4. Methods of Detecting and Quantifying Biomarkers

[0425] In certain embodiments, the biomarkers provide herein can be measured by the protein level, RNA level, DNA level, or cDNA level of the biomarker. In one embodiment, the biomarkers provided herein can measured by the protein level of these biomarkers. In another embodiment, the biomarkers provided herein can be measured by the mRNA levels of these biomarkers.

[0426] In certain embodiments of the various methods provided herein, the two or more of the steps are performed sequentially. In other embodiments of the methods provided herein, two or more of steps are performed in parallel (e.g., at the same time).

[0427] Several protein detection and quantization methods can be used to measure the level of a biomarker. Any suitable protein quantization method can be used. In some embodiments, antibody-based methods are used. Exemplary methods that can be used include, but are not limited to, immunoblotting (Western blot), ELISA, immunohistochemistry, flow cytometry, cytometry bead array, mass spectroscopy, and the like. Several types of ELISA are commonly used, including direct ELISA, indirect ELISA, and sandwich ELISA.

[0428] In some embodiments, the methods provided herein for detecting and quantifying the protein levels of one or more biomarkers are antibody based methods.

[0429] In certain embodiments, provided herein are methods of detecting and quantifying the protein level of biomarker (e.g., a gene product) from a biological sample, comprising contacting proteins within the sample with a first antibody that binds to the biomarker protein. In some embodiments, the methods provided herein further comprise (i) contacting the biomarker protein bound to the first antibody with a second antibody with a detectable label, wherein the second antibody binds to the biomarker protein, and wherein the second antibody binds to a different epitope on the biomarker protein than the first antibody; (ii) detecting the presence of the second antibody bound to the biomarker protein; and (iii) determining the amount of the biomarker protein based on the amount of detectable label in the second antibody. In other embodiments, the methods provided herein further comprise (i) contacting the biomarker protein bound to the first antibody with a second antibody with a detectable label, wherein the second antibody binds to the first antibody; (ii) detecting the presence of the second antibody bound to the first antibody; and (iii) determining the amount of the biomarker protein based on the amount of detectable label in the second antibody.

[0430] In some embodiments of the various methods provided herein, the method comprises using dual staining immunohistochemistry to determine the level of a biomarker. In a dual staining immunohistochemistry assay, a biomarker provided herein and another biomarker are simultaneously detected using a first labeled antibody targeting a biomarker provided herein and a second labeled antibody targeting the other biomarker. Such assay can improve the specificity, accuracy, and sensitivity for detecting and measuring a biomarker provided herein.

[0431] Thus, in some embodiments, the method provided herein comprises (i) contacting proteins within a sample with a first antibody that binds to a biomarker provided herein, the first antibody being coupled with a first detectable label; (ii) contacting the proteins within the sample with a second antibody that binds to another biomarker, the second antibody being coupled with a second detectable label; (iii) detecting the presence of the first antibody and the second antibody bound to the proteins; and (iv) determining the level of the biomarker provided herein based on the amount of detectable label in the first antibody, and determining the level of the other biomarker based on the amount of detectable label in the second antibody.

[0432] In some embodiments, the methods provided herein comprise measuring the protein level of CCL20, CCL22, CSF3(GCSF), CXCL1, CXCL2, CXCL3, CXCL5, CXCL6, IL6, IL8, PTGS2, CCL3, CCL4, CCL8, CFB, IL1B, and/or MMP3. In other embodiments, the methods provided herein comprise measuring the protein level of GCSF, CXCL1, IL4, IL6, IL8, MDC, IP10, GMCSF, MIP1a and/or TGFa.

[0433] In some embodiments, the methods provided herein comprise measuring the protein level of one or more biomarkers selected from a group consisting of GCSF (CSF3), CXCL1, IL6, IL8, IL4, MDC, IP10, GMCSF (CSF2), MIP1a, TGFa, CCL20, CCL22, CXCL2, CXCL3, CXCL5, CXCL6, IL1B, PTGS2, CCL3, CCL4, CCL8, CFB, MMP3, FDCSP, PTX3, CCL3L3, CXCL8, FGF2, NEFM, TNIP3, MMP10, ADORA2A, DEFB4A, GPR84, AC243829.4, COLQ, TFPI2, SPRR2A, OXTR, CCL4L2, MMP1, TNFAIP6, HMX3, LIF, CD274, AC073862.2, TNFRSF11B, AC003092.1, SALL1, AC084871.4, CD38, NFKBIZ, ZC3H12A, SLC4A4, AL139393.3, MSC, SLC1A2, CCL2, GOS2, SLC34A2, AC073611.1, AC106865.1, AL078604.2, INHBA, LCN2, AC009303.4, TDO2, NGF, IER3, BCL2A1, SOD2, CEMIP, SAA1, TRAF1, GCH1, AC007780.1, AC007998.3, TMC1, GRM1, SPINK6, CD1D, IL17C, AC004264.1, EDNRB, DRAM1, CH25H, FOXD4L1, PTGES, SAA2, SLC39A14, RIPK2, PANX2, HS3ST3B1, IL23A, ROR1-AS1, AP002784.1, TMEM132A, ADAMTS5, OSM, RGS3, BMP6, STC1, SIRPA, RFX8, TMEM158, PAX1, IL24, ODAM, BCAT1, AC099494.2, ZNF697, C2CD4A, CCRL2, LAMA1, LSS, TGFB3, TM4SF1, CCL7, FFAR3, QPCTL, GRAIVID1A, DNAJB5, ARSG, NRP2, INSM1, ICAM1, REP15, ACSL4, AC073862.5, LYN, AKR1C1, SDK1, THBS2, IL4I1, PILRA, SLC39A8, NEU4, MT1A, NRIP3, C2CD4B, ASPHD1, SLC11A1, SPRR2B, NFKB2, TNFRSF9, and NKX3-1.

[0434] In some embodiments, the methods provided herein comprise measuring the protein level of one or more biomarkers selected from a group consisting of GCSF (CSF3), CXCL1, IL6, GMCSF (CSF2), CCL20, CCL22, CXCL2, CXCL3, CXCL5, IL1B, PTGS2, CCL3, CCL4, CCL8, CFB, MMP3, FDCSP, PTX3, CCL3L3, CXCL8, FGF2, NEFM, TNIP3, MMP10, ADORA2A, DEFB4A, GPR84, AC243829.4, COLQ, TFPI2, SPRR2A, OXTR, CCL4L2, MMP1, TNFAIP6, HMX3, LIF, CD274, AC073862.2, TNFRSF11B, AC003092.1, SALL1, AC084871.4, CD38, NFKBIZ, ZC3H12A, SLC4A4, AL139393.3, MSC, SLC1A2, CCL2, GOS2, SLC34A2, AC073611.1, AC106865.1, AL078604.2, INHBA, LCN2, AC009303.4, TDO2, NGF, IER3, BCL2A1, SOD2, CEMIP, SAA1, TRAF1, GCH1, AC007780.1, AC007998.3, TMC1, GRM1, SPINK6, CD1D, IL17C, AC004264.1, EDNRB, DRAM1, CH25H, FOXD4L1, PTGES, SAA2, SLC39A14, RIPK2, PANX2, HS3ST3B1, IL23A, ROR1-AS1, AP002784.1, TMEM132A, ADAMTS5, OSM, RGS3, BMP6, STC1, SIRPA, RFX8, TMEM158, PAX1, IL24, ODAM, BCAT1, AC099494.2, ZNF697, C2CD4A, CCRL2, LAMA1, LSS, TGFB3, TM4SF1, CCL7, FFAR3, QPCTL, GRAMD1A, DNAJB5, ARSG, NRP2, INSM1, ICAM1, REP15, ACSL4, AC073862.5, LYN, AKR1C1, SDK1, THBS2, IL4I1, PILRA, SLC39A8, NEU4, MT1A, NRIP3, C2CD4B, ASPHD1, SLC11A1, SPRR2B, NFKB2, TNFRSF9, and NKX3-1.

[0435] In some embodiments, the methods provided herein comprise measuring the protein level of CCL20. In some embodiments, the methods provided herein comprise measuring the protein level of CCL22. In some embodiments, the methods provided herein comprise measuring the protein level of CSF3. In some embodiments, the methods provided herein comprise measuring the protein level of CXCL1. In some embodiments, the methods provided herein comprise measuring the protein level of CXCL2. In some embodiments, the methods provided herein comprise measuring the protein level of CXCL3. In some embodiments, the methods provided herein comprise measuring the protein level of CXCL5. In some embodiments, the methods provided herein comprise measuring the protein level of CXCL6. In some embodiments, the methods provided herein comprise measuring the protein level of IL6. In some embodiments, the methods provided herein comprise measuring the protein level of IL8. In some embodiments, the methods provided herein comprise measuring the protein level of PTGS2. In some embodiments, the methods provided herein comprise measuring the protein level of CCL3. In some embodiments, the methods provided herein comprise measuring the protein level of CCL4. In some embodiments, the methods provided herein comprise measuring the protein level of CCL8. In some embodiments, the methods provided herein comprise measuring the protein level of CFB. In some embodiments, the methods provided herein comprise measuring the protein level of IL1B. In some embodiments, the methods provided herein comprise measuring the protein level of MMP3. In some embodiments, the methods provided herein comprise measuring the protein level of GCSF. In some embodiments, the methods provided herein comprise measuring the protein level of CXCL1. In some embodiments, the methods provided herein comprise measuring the protein level of IL4. In some embodiments, the methods provided herein comprise measuring the protein level of IL6. In some embodiments, the methods provided herein comprise measuring the protein level of IL8. In some embodiments, the methods provided herein comprise measuring the protein level of MDC. In some embodiments, the methods provided herein comprise measuring the protein level of IP10. In some embodiments, the methods provided herein comprise measuring the protein level of GMCSF. In some embodiments, the methods provided herein comprise measuring the protein level of MIP1a. In some embodiments, the methods provided herein comprise measuring the protein level of TGFa.

[0436] In one embodiment, the methods provided herein comprise measuring the protein level of CSF3 (GCSF). In another embodiment, the methods provided herein comprise measuring the protein level of CXCL1. In another embodiment, the methods provided herein comprise measuring the protein level of IL6.

[0437] In some embodiments, the methods provided herein comprise measuring the protein levels of GCSF (CSF3), CXCL1, IL6, IL8, IL4, MDC, IP10, GMCSF (CSF2), MIP1a, TGFa, CCL20, CCL22, CXCL2, CXCL3, CXCL5, CXCL6, IL1B, PTGS2, CCL3, CCL4, CCL8, CFB, MMP3, FDCSP, PTX3, CCL3L3, CXCL8, FGF2, NEFM, TNIP3, MMP10, ADORA2A, DEFB4A, GPR84, AC243829.4, COLQ, TFPI2, SPRR2A, OXTR, CCL4L2, MMP1, TNFAIP6, HMX3, LIF, CD274, AC073862.2, TNFRSF11B, AC003092.1, SALL1, AC084871.4, CD38, NFKBIZ, ZC3H12A, SLC4A4, AL139393.3, MSC, SLC1A2, CCL2, GOS2, SLC34A2, AC073611.1, AC106865.1, AL078604.2, INHBA, LCN2, AC009303.4, TDO2, NGF, IER3, BCL2A1, SOD2, CEMIP, SAA1, TRAF1, GCH1, AC007780.1, AC007998.3, TMC1, GRM1, SPINK6, CD1D, IL17C, AC004264.1, EDNRB, DRAM1, CH25H, FOXD4L1, PTGES, SAA2, SLC39A14, RIPK2, PANX2, HS3ST3B1, IL23A, ROR1-AS1, AP002784.1, TMEM132A, ADAMTS5, OSM, RGS3, BMP6, STC1, SIRPA, RFX8, TMEM158, PAX1, IL24, ODAM, BCAT1, AC099494.2, ZNF697, C2CD4A, CCRL2, LAMA1, LSS, TGFB3, TM4SF1, CCL7, FFAR3, QPCTL, GRAMD1A, DNAJB5, ARSG, NRP2, INSM1, ICAM1, REP15, ACSL4, AC073862.5, LYN, AKR1C1, SDK1, THBS2, IL4I1, PILRA, SLC39A8, NEU4, MT1A, NRIP3, C2CD4B, ASPHD1, SLC11A1, SPRR2B, NFKB2, TNFRSF9, and NKX3-1.

[0438] In some embodiments, the methods provided herein comprise measuring the protein levels of GCSF (CSF3), CXCL1, IL6, GMCSF (CSF2), CCL20, CCL22, CXCL2, CXCL3, CXCL5, IL1B, PTGS2, CCL3, CCL4, CCL8, CFB, MMP3, FDCSP, PTX3, CCL3L3, CXCL8, FGF2, NEFM, TNIP3, MMP10, ADORA2A, DEFB4A, GPR84, AC243829.4, COLQ, TFPI2, SPRR2A, OXTR, CCL4L2, MMP1, TNFAIP6, HMX3, LIF, CD274, AC073862.2, TNFRSF11B, AC003092.1, SALL1, AC084871.4, CD38, NFKBIZ, ZC3H12A, SLC4A4, AL139393.3, MSC, SLC1A2, CCL2, GOS2, SLC34A2, AC073611.1, AC106865.1, AL078604.2, INHBA, LCN2, AC009303.4, TDO2, NGF, IER3, BCL2A1, SOD2, CEMIP, SAA1, TRAF1, GCH1, AC007780.1, AC007998.3, TMC1, GRM1, SPINK6, CD1D, IL17C, AC004264.1, EDNRB, DRAM1, CH25H, FOXD4L1, PTGES, SAA2, SLC39A14, RIPK2, PANX2, HS3ST3B1, IL23A, ROR1-AS1, AP002784.1, TMEM132A, ADAMTS5, OSM, RGS3, BMP6, STC1, SIRPA, RFX8, TMEM158, PAX1, IL24, ODAM, BCAT1, AC099494.2, ZNF697, C2CD4A, CCRL2, LAMA1, LSS, TGFB3, TM4SF1, CCL7, FFAR3, QPCTL, GRAMD1A, DNAJB5, ARSG, NRP2, INSM1, ICAM1, REP15, ACSL4, AC073862.5, LYN, AKR1C1, SDK1, THBS2, IL4I1, PILRA, SLC39A8, NEU4, MT1A, NRIP3, C2CD4B, ASPHD1, SLC11A1, SPRR2B, NFKB2, TNFRSF9, and NKX3-1.

[0439] In some embodiments, the methods provided herein comprise measuring the protein levels of CCL20, CCL22, CSF3(GCSF), CXCL1, CXCL2, CXCL3, CXCL5, CXCL6, IL6, IL8, PTGS2, CCL3, CCL4, CCL8, CFB, IL1B, and MMP3.

[0440] In some embodiments, the methods provided herein comprise measuring the protein levels of CCL20, CCL22, CSF3(GCSF), CXCL1, CXCL2, CXCL3, CXCL5, CXCL6, IL6, IL8, and PTGS2.

[0441] In some embodiments, the methods provided herein comprise measuring the protein levels of CCL20, CCL3, CCL4, CCL8, CFB, CSF3(GCSF), CXCL1, CXCL2, CXCL3, CXCL5, IL1B, IL6, IL8, MMP3, and PTGS2.

[0442] In some embodiments, the methods provided herein comprise measuring the protein levels of CCL20, CSF3(GCSF), CXCL1, CXCL2, CXCL3, CXCL5, IL6, IL8, and PTGS2.

[0443] In some embodiments, the methods provided herein comprise measuring the protein levels of CSF3 (GCSF), CXCL1 and IL6.

[0444] In some embodiments, the methods provided herein comprise measuring the protein levels of GCSF, CXCL1, IL4, IL6, IL8, MDC, IP10, GMCSF, MIP1a and TGFa.

[0445] In some embodiments, the methods provided herein comprise measuring the protein levels of GCSF, CXCL1, IL4, IL6, IL8, MDC and IP10.

[0446] In some embodiments, the methods provided herein comprise measuring the protein levels of CXCL1, GCSF, GMCSF, IL6, IL8, MIP1a and TGFa.

[0447] In some embodiments, the methods provided herein comprise measuring the protein levels of GCSF, CXCL1, IL6 and IL8.

[0448] Several methods of detecting or quantitating mRNA levels are known in the art. Exemplary methods include, but are not limited to, northern blots, ribonuclease protection assays, PCR-based methods, a Nanostring assay, and the like. The mRNA sequence of a biomarker can be used to prepare a probe that is at least partially complementary to the mRNA sequence. The probe can then be used to detect the mRNA in a sample, using any suitable assay, such as PCR-based methods, northern blotting, a dipstick assay, and the like.

[0449] In other embodiments, a nucleic acid assay for testing for compound activity in a biological sample can be prepared. An assay typically contains a solid support and at least one nucleic acid contacting the support, where the nucleic acid corresponds to at least a portion of an mRNA that has altered expression during a compound treatment in a patient, such as the mRNA of a biomarker. The assay can also have a means for detecting the altered expression of the mRNA in the sample.

[0450] The assay method can be varied depending on the type of mRNA information desired. Exemplary methods include but are not limited to Northern blots and PCR-based methods (e.g., qRT-PCR). Methods such as qRT-PCR can also accurately quantitate the amount of the mRNA in a sample.

[0451] Any suitable assay platform can be used to determine the presence of mRNA in a sample. For example, an assay may be in the form of a dipstick, a membrane, a chip, a disk, a test strip, a filter, a microsphere, a slide, a multi-well plate, or an optical fiber. An assay system may have a solid support on which a nucleic acid corresponding to the mRNA is attached. The solid support may comprise, for example, a plastic, silicon, a metal, a resin, glass, a membrane, a particle, a precipitate, a gel, a polymer, a sheet, a sphere, a polysaccharide, a capillary, a film, a plate, or a slide. The assay components can be prepared and packaged together as a kit for detecting an mRNA.

[0452] The nucleic acid can be labeled, if desired, to make a population of labeled mRNAs. In general, a sample can be labeled using methods that are well known in the art (e.g., using DNA ligase, terminal transferase, or by labeling the RNA backbone, etc.). See, e.g., Ausubel et al., Short Protocols in Molecular Biology (Wiley & Sons, 3rd ed. 1995); Sambrook et al., Molecular Cloning: A Laboratory Manual (Cold Spring Harbor, N.Y., 3rd ed. 2001). In some embodiments, the sample is labeled with fluorescent label. Exemplary fluorescent dyes include, but are not limited to, xanthene dyes, fluorescein dyes (e.g., fluorescein isothiocyanate (FITC), 6-carboxyfluorescein (FAM), 6 carboxy-2′,4′,7′,4,7-hexachlorofluorescein (HEX), 6-carboxy-4′,5′-dichloro-2′,7′-dimethoxyfluorescein (JOE)), rhodamine dyes (e.g., rhodamine 110 (R110), N,N,N′,N′-tetramethyl-6-carboxyrhodamine (TAMRA), 6-carboxy-X-rhodamine (ROX), 5-carboxyrhodamine 6G (R6G5 or G5), 6-carboxyrhodamine 6G (R6G6 or G6)), cyanine dyes (e.g., Cy3, Cy5 and Cy7), Alexa dyes (e.g., Alexa-fluor-555), coumarin, Diethylaminocoumarin, umbelliferone, benzimide dyes (e.g., Hoechst 33258), phenanthridine dyes (e.g., Texas Red), ethidium dyes, acridine dyes, carbazole dyes, phenoxazine dyes, porphyrin dyes, polymethine dyes, BODIPY dyes, quinoline dyes, Pyrene, Fluorescein Chlorotriazinyl, eosin dyes, Tetramethylrhodamine, Lissamine, Napthofluorescein, and the like.

[0453] In some embodiments, the mRNA sequences comprise at least one mRNA of a biomarker provided herein.

[0454] The nucleic acids may be present in specific, addressable locations on a solid support, each corresponding to at least a portion of mRNA sequences that are differentially expressed upon treatment of a compound in a cell or a patient.

[0455] A typical mRNA assay method can contain the steps of 1) obtaining surface-bound subject probes; 2) hybridizing a population of mRNAs to the surface-bound probes under conditions sufficient to provide for specific binding; (3) post-hybridization washing to remove nucleic acids not specifically bound to the surface-bound probes; and (4) detecting the hybridized mRNAs. The reagents used in each of these steps and their conditions for use may vary depending on the particular application.

[0456] Hybridization can be carried out under suitable hybridization conditions, which may vary in stringency as desired. Typical conditions are sufficient to produce probe/target complexes on a solid surface between complementary binding members, i.e., between surface-bound subject probes and complementary mRNAs in a sample. In certain embodiments, stringent hybridization conditions may be employed.

[0457] Hybridization is typically performed under stringent hybridization conditions. Standard hybridization techniques (e.g., under conditions sufficient to provide for specific binding of target mRNAs in the sample to the probes) are described in Kallioniemi et al., Science 1992, 258:818-821 and International Patent Application Publication No. WO 93/18186. Several guides to general techniques are available, e.g., Tijssen, Hybridization with Nucleic Acid Probes, Parts I and II (Elsevier, Amsterdam 1993). For descriptions of techniques suitable for in situ hybridizations, see Gall et al., Meth. Enzymol. 1981, 21:470-480; Angerer et al., Genetic Engineering: Principles and Methods, Vol 7, pgs 43-65 (Plenum Press, New York, Setlow and Hollaender, eds. 1985). Selection of appropriate conditions, including temperature, salt concentration, polynucleotide concentration, hybridization time, stringency of washing conditions, and the like will depend on experimental design, including source of sample, identity of capture agents, degree of complementarity expected, etc., and may be determined as a matter of routine experimentation for those of ordinary skill in the art.

[0458] Those of ordinary skill will readily recognize that alternative but comparable hybridization and wash conditions can be utilized to provide conditions of similar stringency.

[0459] After the mRNA hybridization procedure, the surface bound polynucleotides are typically washed to remove unbound nucleic acids. Washing may be performed using any convenient washing protocol, where the washing conditions are typically stringent, as described above. The hybridization of the target mRNAs to the probes is then detected using standard techniques.

[0460] Other methods, such as PCR-based methods, can also be used to detect the expression of a biomarker provided herein. Examples of PCR methods can be found in U.S. Pat. No. 6,927,024, which is incorporated by reference herein in its entirety. Examples of RT-PCR methods can be found in U.S. Pat. No. 7,122,799, which is incorporated by reference herein in its entirety. A method of fluorescent in situ PCR is described in U.S. Pat. No. 7,186,507, which is incorporated by reference herein in its entirety.

[0461] In some embodiments, quantitative Reverse Transcription-PCR (qRT-PCR) can be used for both the detection and quantification of RNA targets (Bustin et al., Clin. Sci. 2005, 109:365-379). Quantitative results obtained by qRT-PCR are generally more informative than qualitative data. Thus, in some embodiments, qRT-PCR-based assays can be useful to measure mRNA levels during cell-based assays. The qRT-PCR method is also useful to monitor patient therapy. Examples of qRT-PCR-based methods can be found, for example, in U.S. Pat. No. 7,101,663, which is incorporated by reference herein in its entirety.

[0462] In contrast to regular reverse transcriptase-PCR and analysis by agarose gels, qRT-PCR gives quantitative results. An additional advantage of qRT-PCR is the relative ease and convenience of use. Instruments for qRT-PCR, such as the Applied Biosystems 7500, are available commercially, so are the reagents, such as TaqMan® Sequence Detection Chemistry. For example, TaqMan® Gene Expression Assays can be used, following the manufacturer's instructions. These kits are pre-formulated gene expression assays for rapid, reliable detection and quantification of human, mouse, and rat mRNA transcripts. An exemplary qRT-PCR program, for example, is 50° C. for 2 minutes, 95° C. for 10 minutes, 40 cycles of 95° C. for 15 seconds, then 60° C. for 1 minute.

[0463] To determine the cycle number at which the fluorescence signal associated with a particular amplicon accumulation crosses the threshold (referred to as the C_{T}), the data can be analyzed, for example, using 7500 Real-Time PCR System Sequence Detection software vs. using the comparative C_{T} relative quantification calculation method. Using this method, the output is expressed as a fold-change of expression levels. In some embodiments, the threshold level can be selected to be automatically determined by the software. In some embodiments, the threshold level is set to be above the baseline but sufficiently low to be within the exponential growth region of an amplification curve.

[0464] Other methods, such as RNA sequencing-based methods, can also be used to detect the expression of a biomarker provided herein. In certain embodiments, the RNA expression profile of biomarkers is measured by high-throughput sequencing (e.g., whole transcriptome shotgun sequencing (RNA sequencing or RNAseq)). RNA sequencing methods have been described (see Wang Z, Gerstein M and Snyder M, Nature Review Genetics (2009) 10: 57-63; Maher C A et al., Nature (2009) 458: 97-101; Kukrba K & Montgomery S B, Cold Spring Harbor Protocols (2015) 2015 (11): 951-969).

[0465] In some embodiments, the methods provided herein comprise measuring the mRNA level of CCL20, CCL22, CSF3(GCSF), CXCL1, CXCL2, CXCL3, CXCLS, CXCL6, IL6, IL8, PTGS2, CCL3, CCL4, CCL8, CFB, IL1B, and/or MMP3. In other embodiments, the methods provided herein comprise measuring the mRNA level of GCSF, CXCL1, IL4, IL6, IL8, MDC, IP10, GMC SF, MIP1a and/or TGFa.

[0466] In some embodiments, the methods provided herein comprise measuring the mRNA level of one or more biomarkers selected from a group consisting of GCSF (CSF3), CXCL1, IL6, IL8, IL4, MDC, IP10, GMCSF (CSF2), MIP1a, TGFa, CCL20, CCL22, CXCL2, CXCL3, CXCL5, CXCL6, IL1B, PTGS2, CCL3, CCL4, CCL8, CFB, MMP3, FDCSP, PTX3, CCL3L3, CXCL8, FGF2, NEFM, TNIP3, MMP10, ADORA2A, DEFB4A, GPR84, AC243829.4, COLQ, TFPI2, SPRR2A, OXTR, CCL4L2, MMP1, TNFAIP6, HMX3, LIF, CD274, AC073862.2, TNFRSF11B, AC003092.1, SALL1, AC084871.4, CD38, NFKBIZ, ZC3H12A, SLC4A4, AL139393.3, MSC, SLC1A2, CCL2, GOS2, SLC34A2, AC073611.1, AC106865.1, AL078604.2, INHBA, LCN2, AC009303.4, TDO2, NGF, IER3, BCL2A1, SOD2, CEMIP, SAA1, TRAF1, GCH1, AC007780.1, AC007998.3, TMC1, GRM1, SPINK6, CD1D, IL17C, AC004264.1, EDNRB, DRAM1, CH25H, FOXD4L1, PTGES, SAA2, SLC39A14, RIPK2, PANX2, HS3ST3B1, IL23A, ROR1-AS1, AP002784.1, TMEM132A, ADAMTS5, OSM, RGS3, BMP6, STC1, SIRPA, RFX8, TMEM158, PAX1, IL24, ODAM, BCAT1, AC099494.2, ZNF697, C2CD4A, CCRL2, LAMA1, LSS, TGFB3, TM4SF1, CCL7, FFAR3, QPCTL, GRAMD1A, DNAJB5, ARSG, NRP2, INSM1, ICAM1, REP15, ACSL4, AC073862.5, LYN, AKR1C1, SDK1, THBS2, IL4I1, PILRA, SLC39A8, NEU4, MT1A, NRIP3, C2CD4B, ASPHD1, SLC11A1, SPRR2B, NFKB2, TNFRSF9, and NKX3-1.

[0467] In some embodiments, the methods provided herein comprise measuring the mRNA level of one or more biomarkers selected from a group consisting of GCSF (CSF3), CXCL1, IL6, GMCSF (CSF2), CCL20, CCL22, CXCL2, CXCL3, CXCL5, IL1B, PTGS2, CCL3, CCL4, CCL8, CFB, MMP3, FDCSP, PTX3, CCL3L3, CXCL8, FGF2, NEFM, TNIP3, MMP10, ADORA2A, DEFB4A, GPR84, AC243829.4, COLQ, TFPI2, SPRR2A, OXTR, CCL4L2, MMP1, TNFAIP6, HMX3, LIF, CD274, AC073862.2, TNFRSF11B, AC003092.1, SALL1, AC084871.4, CD38, NFKBIZ, ZC3H12A, SLC4A4, AL139393.3, MSC, SLC1A2, CCL2, GOS2, SLC34A2, AC073611.1, AC106865.1, AL078604.2, INHBA, LCN2, AC009303.4, TDO2, NGF, IER3, BCL2A1, SOD2, CEMIP, SAA1, TRAF1, GCH1, AC007780.1, AC007998.3, TMC1, GRM1, SPINK6, CD1D, IL17C, AC004264.1, EDNRB, DRAM1, CH25H, FOXD4L1, PTGES, SAA2, SLC39A14, RIPK2, PANX2, HS3ST3B1, IL23A, ROR1-AS1, AP002784.1, TMEM132A, ADAMTS5, OSM, RGS3, BMP6, STC1, SIRPA, RFX8, TMEM158, PAX1, IL24, ODAM, BCAT1, AC099494.2, ZNF697, C2CD4A, CCRL2, LAMA1, LSS, TGFB3, TM4SF1, CCL7, FFAR3, QPCTL, GRAMD1A, DNAJB5, ARSG, NRP2, INSM1, ICAM1, REP15, ACSL4, AC073862.5, LYN, AKR1C1, SDK1, THBS2, IL4I1, PILRA, SLC39A8, NEU4, MT1A, NRIP3, C2CD4B, ASPHD1, SLC11A1, SPRR2B, NFKB2, TNFRSF9, and NKX3-1.

[0468] In some embodiments, the methods provided herein comprise measuring the mRNA level of CCL20. In some embodiments, the methods provided herein comprise measuring the mRNA level of CCL22. In some embodiments, the methods provided herein comprise measuring the mRNA level of CSF3. In some embodiments, the methods provided herein comprise measuring the mRNA level of CXCL1. In some embodiments, the methods provided herein comprise measuring the mRNA level of CXCL2. In some embodiments, the methods provided herein comprise measuring the mRNA level of CXCL3. In some embodiments, the methods provided herein comprise measuring the mRNA level of CXCL5. In some embodiments, the methods provided herein comprise measuring the mRNA level of CXCL6. In some embodiments, the methods provided herein comprise measuring the mRNA level of IL6. In some embodiments, the methods provided herein comprise measuring the mRNA level of IL8. In some embodiments, the methods provided herein comprise measuring the mRNA level of PTGS2. In some embodiments, the methods provided herein comprise measuring the mRNA level of CCL3. In some embodiments, the methods provided herein comprise measuring the mRNA level of CCL4. In some embodiments, the methods provided herein comprise measuring the mRNA level of CCL8. In some embodiments, the methods provided herein comprise measuring the mRNA level of CFB. In some embodiments, the methods provided herein comprise measuring the mRNA level of IL1B. In some embodiments, the methods provided herein comprise measuring the mRNA level of MMP3. In some embodiments, the methods provided herein comprise measuring the mRNA level of GCSF. In some embodiments, the methods provided herein comprise measuring the mRNA level of CXCL1. In some embodiments, the methods provided herein comprise measuring the mRNA level of IL4. In some embodiments, the methods provided herein comprise measuring the mRNA level of IL6. In some embodiments, the methods provided herein comprise measuring the mRNA level of IL8. In some embodiments, the methods provided herein comprise measuring the mRNA level of MDC. In some embodiments, the methods provided herein comprise measuring the mRNA level of IP10. In some embodiments, the methods provided herein comprise measuring the mRNA level of GMCSF. In some embodiments, the methods provided herein comprise measuring the mRNA level of MIP1a. In some embodiments, the methods provided herein comprise measuring the mRNA level of TGFa.

[0469] In one embodiment, the methods provided herein comprise measuring the mRNA level of CSF3 (GCSF). In another embodiment, the methods provided herein comprise measuring the mRNA level of CXCL1. In another embodiment, the methods provided herein comprise measuring the mRNA level of IL6.

[0470] In some embodiments, the methods provided herein comprise measuring the mRNA levels of GCSF (CSF3), CXCL1, IL6, IL8, IL4, MDC, IP10, GMCSF (CSF2), MIP1a, TGFa, CCL20, CCL22, CXCL2, CXCL3, CXCL5, CXCL6, IL1B, PTGS2, CCL3, CCL4, CCL8, CFB, MMP3, FDCSP, PTX3, CCL3L3, CXCL8, FGF2, NEFM, TNIP3, MMP10, ADORA2A, DEFB4A, GPR84, AC243829.4, COLQ, TFPI2, SPRR2A, OXTR, CCL4L2, MMP1, TNFAIP6, HMX3, LIF, CD274, AC073862.2, TNFRSF11B, AC003092.1, SALL1, AC084871.4, CD38, NFKBIZ, ZC3H12A, SLC4A4, AL139393.3, MSC, SLC1A2, CCL2, GOS2, SLC34A2, AC073611.1, AC106865.1, AL078604.2, INHBA, LCN2, AC009303.4, TDO2, NGF, IER3, BCL2A1, SOD2, CEMIP, SAA1, TRAF1, GCH1, AC007780.1, AC007998.3, TMC1, GRM1, SPINK6, CD1D, IL17C, AC004264.1, EDNRB, DRAM1, CH25H, FOXD4L1, PTGES, SAA2, SLC39A14, RIPK2, PANX2, HS3ST3B1, IL23A, ROR1-AS1, AP002784.1, TMEM132A, ADAMTS5, OSM, RGS3, BMP6, STC1, SIRPA, RFX8, TMEM158, PAX1, IL24, ODAM, BCAT1, AC099494.2, ZNF697, C2CD4A, CCRL2, LAMA1, LSS, TGFB3, TM4SF1, CCL7, FFAR3, QPCTL, GRAMD1A, DNAJB5, ARSG, NRP2, INSM1, ICAM1, REP15, ACSL4, AC073862.5, LYN, AKR1C1, SDK1, THBS2, IL4I1, PILRA, SLC39A8, NEU4, MT1A, NRIP3, C2CD4B, ASPHD1, SLC11A1, SPRR2B, NFKB2, TNFRSF9, and NKX3-1.

[0471] In some embodiments, the methods provided herein comprise measuring the mRNA levels of GCSF (CSF3), CXCL1, IL6, GMCSF (CSF2), CCL20, CCL22, CXCL2, CXCL3, CXCL5, IL1B, PTGS2, CCL3, CCL4, CCL8, CFB, MMP3, FDCSP, PTX3, CCL3L3, CXCL8, FGF2, NEFM, TNIP3, MMP10, ADORA2A, DEFB4A, GPR84, AC243829.4, COLQ, TFPI2, SPRR2A, OXTR, CCL4L2, MMP1, TNFAIP6, HMX3, LIF, CD274, AC073862.2, TNFRSF11B, AC003092.1, SALL1, AC084871.4, CD38, NFKBIZ, ZC3H12A, SLC4A4, AL139393.3, MSC, SLC1A2, CCL2, GOS2, SLC34A2, AC073611.1, AC106865.1, AL078604.2, INHBA, LCN2, AC009303.4, TDO2, NGF, IER3, BCL2A1, SOD2, CEMIP, SAA1, TRAF1, GCH1, AC007780.1, AC007998.3, TMC1, GRM1, SPINK6, CD1D, IL17C, AC004264.1, EDNRB, DRAM1, CH25H, FOXD4L1, PTGES, SAA2, SLC39A14, RIPK2, PANX2, HS3ST3B1, IL23A, ROR1-AS1, AP002784.1, TMEM132A, ADAMTS5, OSM, RGS3, BMP6, STC1, SIRPA, RFX8, TMEM158, PAX1, IL24, ODAM, BCAT1, AC099494.2, ZNF697, C2CD4A, CCRL2, LAMA1, LSS, TGFB3, TM4SF1, CCL7, FFAR3, QPCTL, GRAMD1A, DNAJB5, ARSG, NRP2, INSM1, ICAM1, REP15, ACSL4, AC073862.5, LYN, AKR1C1, SDK1, THBS2, IL4I1, PILRA, SLC39A8, NEU4, MT1A, NRIP3, C2CD4B, ASPHD1, SLC11A1, SPRR2B, NFKB2, TNFRSF9, and NKX3-1.

[0472] In some embodiments, the methods provided herein comprise measuring the mRNA levels of CCL20, CCL22, CSF3(GCSF), CXCL1, CXCL2, CXCL3, CXCL5, CXCL6, IL6, IL8, PTGS2, CCL3, CCL4, CCL8, CFB, IL1B, and MMP3.

[0473] In some embodiments, the methods provided herein comprise measuring the mRNA levels of CCL20, CCL22, CSF3(GCSF), CXCL1, CXCL2, CXCL3, CXCL5, CXCL6, IL6, IL8, and PTGS2.

[0474] In some embodiments, the methods provided herein comprise measuring the mRNA levels of CCL20, CCL3, CCL4, CCL8, CFB, CSF3(GCSF), CXCL1, CXCL2, CXCL3, CXCL5, IL1B, IL6, IL8, MMP3, and PTGS2.

[0475] In some embodiments, the methods provided herein comprise measuring the mRNA levels of CCL20, CSF3(GCSF), CXCL1, CXCL2, CXCL3, CXCL5, IL6, IL8, and PTGS2.

[0476] In some embodiments, the methods provided herein comprise measuring the mRNA levels of CSF3 (GCSF), CXCL1 and IL6.

[0477] In some embodiments, the methods provided herein comprise measuring the mRNA levels of GCSF, CXCL1, IL4, IL6, IL8, MDC, IP10, GMCSF, MIP1a and TGFa.

[0478] In some embodiments, the methods provided herein comprise measuring the mRNA levels of GCSF, CXCL1, IL4, IL6, IL8, MDC and IP10.

[0479] In some embodiments, the methods provided herein comprise measuring the mRNA levels of CXCL1, GCSF, GMCSF, IL6, IL8, MIP1a and TGFa.

[0480] In some embodiments, the methods provided herein comprise measuring the mRNA levels of GCSF, CXCL1, IL6 and IL8.

[0481] In some embodiments, the methods provided herein comprise measuring the cDNA level of CCL20, CCL22, CSF3(GCSF), CXCL1, CXCL2, CXCL3, CXCL5, CXCL6, IL6, IL8, PTGS2, CCL3, CCL4, CCL8, CFB, IL1B, and/or MMP3. In other embodiments, the methods provided herein comprise measuring the cDNA level of GCSF, CXCL1, IL4, IL6, IL8, MDC, IP10, GMCSF, MIP1a and/or TGFa.

[0482] In some embodiments, the methods provided herein comprise measuring the cDNA level of one or more biomarkers selected from a group consisting of GCSF (CSF3), CXCL1, IL6, IL8, IL4, MDC, IP10, GMCSF (CSF2), MIP1a, TGFa, CCL20, CCL22, CXCL2, CXCL3, CXCL5, CXCL6, IL1B, PTGS2, CCL3, CCL4, CCL8, CFB, MMP3, FDCSP, PTX3, CCL3L3, CXCL8, FGF2, NEFM, TNIP3, MMP10, ADORA2A, DEFB4A, GPR84, AC243829.4, COLQ, TFPI2, SPRR2A, OXTR, CCL4L2, MMP1, TNFAIP6, HMX3, LIF, CD274, AC073862.2, TNFRSF11B, AC003092.1, SALL1, AC084871.4, CD38, NFKBIZ, ZC3H12A, SLC4A4, AL139393.3, MSC, SLC1A2, CCL2, GOS2, SLC34A2, AC073611.1, AC106865.1, AL078604.2, INHBA, LCN2, AC009303.4, TDO2, NGF, IER3, BCL2A1, SOD2, CEMIP, SAA1, TRAF1, GCH1, AC007780.1, AC007998.3, TMC1, GRM1, SPINK6, CD1D, IL17C, AC004264.1, EDNRB, DRAM1, CH25H, FOXD4L1, PTGES, SAA2, SLC39A14, RIPK2, PANX2, HS3ST3B1, IL23A, ROR1-AS1, AP002784.1, TMEM132A, ADAMTS5, OSM, RGS3, BMP6, STC1, SIRPA, RFX8, TMEM158, PAX1, IL24, ODAM, BCAT1, AC099494.2, ZNF697, C2CD4A, CCRL2, LAMA1, LSS, TGFB3, TM4SF1, CCL7, FFAR3, QPCTL, GRAMD1A, DNAJB5, ARSG, NRP2, INSM1, ICAM1, REP15, ACSL4, AC073862.5, LYN, AKR1C1, SDK1, THBS2, IL4I1, PILRA, SLC39A8, NEU4, MT1A, NRIP3, C2CD4B, ASPHD1, SLC11A1, SPRR2B, NFKB2, TNFRSF9, and NKX3-1.

[0483] In some embodiments, the methods provided herein comprise measuring the cDNA level of one or more biomarkers selected from a group consisting of GCSF (CSF3), CXCL1, IL6, GMCSF (CSF2), CCL20, CCL22, CXCL2, CXCL3, CXCL5, IL1B, PTGS2, CCL3, CCL4, CCL8, CFB, MMP3, FDCSP, PTX3, CCL3L3, CXCL8, FGF2, NEFM, TNIP3, MMP10, ADORA2A, DEFB4A, GPR84, AC243829.4, COLQ, TFPI2, SPRR2A, OXTR, CCL4L2, MMP1, TNFAIP6, HMX3, LIF, CD274, AC073862.2, TNFRSF11B, AC003092.1, SALL1, AC084871.4, CD38, NFKBIZ, ZC3H12A, SLC4A4, AL139393.3, MSC, SLC1A2, CCL2, GOS2, SLC34A2, AC073611.1, AC106865.1, AL078604.2, INHBA, LCN2, AC009303.4, TDO2, NGF, IER3, BCL2A1, SOD2, CEMIP, SAA1, TRAF1, GCH1, AC007780.1, AC007998.3, TMC1, GRM1, SPINK6, CD1D, IL17C, AC004264.1, EDNRB, DRAM1, CH25H, FOXD4L1, PTGES, SAA2, SLC39A14, RIPK2, PANX2, HS3ST3B1, IL23A, ROR1-AS1, AP002784.1, TMEM132A, ADAMTS5, OSM, RGS3, BMP6, STC1, SIRPA, RFX8, TMEM158, PAX1, IL24, ODAM, BCAT1, AC099494.2, ZNF697, C2CD4A, CCRL2, LAMA1, LSS, TGFB3, TM4SF1, CCL7, FFAR3, QPCTL, GRAMD1A, DNAJB5, ARSG, NRP2, INSM1, ICAM1, REP15, ACSL4, AC073862.5, LYN, AKR1C1, SDK1, THBS2, IL4I1, PILRA, SLC39A8, NEU4, MT1A, NRIP3, C2CD4B, ASPHD1, SLC11A1, SPRR2B, NFKB2, TNFRSF9, and NKX3-1.

[0484] In some embodiments, the methods provided herein comprise measuring the cDNA level of CCL20. In some embodiments, the methods provided herein comprise measuring the cDNA level of CCL22. In some embodiments, the methods provided herein comprise measuring the cDNA level of CSF3. In some embodiments, the methods provided herein comprise measuring the cDNA level of CXCL1. In some embodiments, the methods provided herein comprise measuring the cDNA level of CXCL2. In some embodiments, the methods provided herein comprise measuring the cDNA level of CXCL3. In some embodiments, the methods provided herein comprise measuring the cDNA level of CXCL5. In some embodiments, the methods provided herein comprise measuring the cDNA level of CXCL6. In some embodiments, the methods provided herein comprise measuring the cDNA level of IL6. In some embodiments, the methods provided herein comprise measuring the cDNA level of IL8. In some embodiments, the methods provided herein comprise measuring the cDNA level of PTGS2. In some embodiments, the methods provided herein comprise measuring the cDNA level of CCL3. In some embodiments, the methods provided herein comprise measuring the cDNA level of CCL4. In some embodiments, the methods provided herein comprise measuring the cDNA level of CCL8. In some embodiments, the methods provided herein comprise measuring the cDNA level of CFB. In some embodiments, the methods provided herein comprise measuring the cDNA level of IL1B. In some embodiments, the methods provided herein comprise measuring the cDNA level of MMP3. In some embodiments, the methods provided herein comprise measuring the cDNA level of GCSF. In some embodiments, the methods provided herein comprise measuring the cDNA level of CXCL1. In some embodiments, the methods provided herein comprise measuring the cDNA level of IL4. In some embodiments, the methods provided herein comprise measuring the cDNA level of IL6. In some embodiments, the methods provided herein comprise measuring the cDNA level of IL8. In some embodiments, the methods provided herein comprise measuring the cDNA level of MDC. In some embodiments, the methods provided herein comprise measuring the cDNA level of IP10. In some embodiments, the methods provided herein comprise measuring the cDNA level of GMCSF. In some embodiments, the methods provided herein comprise measuring the cDNA level of MIP1a. In some embodiments, the methods provided herein comprise measuring the cDNA level of TGFa.

[0485] In one embodiment, the methods provided herein comprise measuring the cDNA level of CSF3 (GCSF). In another embodiment, the methods provided herein comprise measuring the cDNA level of CXCL1. In another embodiment, the methods provided herein comprise measuring the cDNA level of IL6.

[0486] In some embodiments, the methods provided herein comprise measuring the cDNA levels of GCSF (CSF3), CXCL1, IL6, IL8, IL4, MDC, IP10, GMCSF (CSF2), MIP1a, TGFa, CCL20, CCL22, CXCL2, CXCL3, CXCL5, CXCL6, IL1B, PTGS2, CCL3, CCL4, CCL8, CFB, MMP3, FDCSP, PTX3, CCL3L3, CXCL8, FGF2, NEFM, TNIP3, MMP10, ADORA2A, DEFB4A, GPR84, AC243829.4, COLQ, TFPI2, SPRR2A, OXTR, CCL4L2, MMP1, TNFAIP6, HMX3, LIF, CD274, AC073862.2, TNFRSF11B, AC003092.1, SALL1, AC084871.4, CD38, NFKBIZ, ZC3H12A, SLC4A4, AL139393.3, MSC, SLC1A2, CCL2, GOS2, SLC34A2, AC073611.1, AC106865.1, AL078604.2, INHBA, LCN2, AC009303.4, TDO2, NGF, IER3, BCL2A1, SOD2, CEMIP, SAA1, TRAF1, GCH1, AC007780.1, AC007998.3, TMC1, GRM1, SPINK6, CD1D, IL17C, AC004264.1, EDNRB, DRAM1, CH25H, FOXD4L1, PTGES, SAA2, SLC39A14, RIPK2, PANX2, HS3ST3B1, IL23A, ROR1-AS1, AP002784.1, TMEM132A, ADAMTS5, OSM, RGS3, BMP6, STC1, SIRPA, RFX8, TMEM158, PAX1, IL24, ODAM, BCAT1, AC099494.2, ZNF697, C2CD4A, CCRL2, LAMA1, LSS, TGFB3, TM4SF1, CCL7, FFAR3, QPCTL, GRAMD1A, DNAJB5, ARSG, NRP2, INSM1, ICAM1, REP15, ACSL4, AC073862.5, LYN, AKR1C1, SDK1, THBS2, IL4I1, PILRA, SLC39A8, NEU4, MT1A, NRIP3, C2CD4B, ASPHD1, SLC11A1, SPRR2B, NFKB2, TNFRSF9, and NKX3-1.

[0487] In some embodiments, the methods provided herein comprise measuring the cDNA levels of GCSF (CSF3), CXCL1, IL6, GMCSF (CSF2), CCL20, CCL22, CXCL2, CXCL3, CXCL5, IL1B, PTGS2, CCL3, CCL4, CCL8, CFB, MMP3, FDCSP, PTX3, CCL3L3, CXCL8, FGF2, NEFM, TNIP3, MMP10, ADORA2A, DEFB4A, GPR84, AC243829.4, COLQ, TFPI2, SPRR2A, OXTR, CCL4L2, MMP1, TNFAIP6, HMX3, LIF, CD274, AC073862.2, TNFRSF11B, AC003092.1, SALL1, AC084871.4, CD38, NFKBIZ, ZC3H12A, SLC4A4, AL139393.3, MSC, SLC1A2, CCL2, GOS2, SLC34A2, AC073611.1, AC106865.1, AL078604.2, INHBA, LCN2, AC009303.4, TDO2, NGF, IER3, BCL2A1, SOD2, CEMIP, SAA1, TRAF1, GCH1, AC007780.1, AC007998.3, TMC1, GRM1, SPINK6, CD1D, IL17C, AC004264.1, EDNRB, DRAM1, CH25H, FOXD4L1, PTGES, SAA2, SLC39A14, RIPK2, PANX2, HS3ST3B1, IL23A, ROR1-AS1, AP002784.1, TMEM132A, ADAMTS5, OSM, RGS3, BMP6, STC1, SIRPA, RFX8, TMEM158, PAX1, IL24, ODAM, BCAT1, AC099494.2, ZNF697, C2CD4A, CCRL2, LAMA1, LSS, TGFB3, TM4SF1, CCL7, FFAR3, QPCTL, GRAMD1A, DNAJB5, ARSG, NRP2, INSM1, ICAM1, REP15, ACSL4, AC073862.5, LYN, AKR1C1, SDK1, THBS2, IL4I1, PILRA, SLC39A8, NEU4, MT1A, NRIP3, C2CD4B, ASPHD1, SLC11A1, SPRR2B, NFKB2, TNFRSF9, and NKX3-1.

[0488] In some embodiments, the methods provided herein comprise measuring the cDNA levels of CCL20, CCL22, CSF3(GCSF), CXCL1, CXCL2, CXCL3, CXCL5, CXCL6, IL6, IL8, PTGS2, CCL3, CCL4, CCL8, CFB, IL1B, and MMP3.

[0489] In some embodiments, the methods provided herein comprise measuring the cDNA levels of CCL20, CCL22, CSF3(GCSF), CXCL1, CXCL2, CXCL3, CXCL5, CXCL6, IL6, IL8, and PTGS2.

[0490] In some embodiments, the methods provided herein comprise measuring the cDNA levels of CCL20, CCL3, CCL4, CCL8, CFB, CSF3(GCSF), CXCL1, CXCL2, CXCL3, CXCL5, IL1B, IL6, IL8, MMP3, and PTGS2.

[0491] In some embodiments, the methods provided herein comprise measuring the cDNA levels of CCL20, CSF3(GCSF), CXCL1, CXCL2, CXCL3, CXCL5, IL6, IL8, and PTGS2.

[0492] In some embodiments, the methods provided herein comprise measuring the cDNA levels of CSF3 (GCSF), CXCL1 and IL6.

[0493] In some embodiments, the methods provided herein comprise measuring the cDNA levels of GCSF, CXCL1, IL4, IL6, IL8, MDC, IP10, GMCSF, MIP1a and TGFa.

[0494] In some embodiments, the methods provided herein comprise measuring the cDNA levels of GCSF, CXCL1, IL4, IL6, IL8, MDC and IP10.

[0495] In some embodiments, the methods provided herein comprise measuring the cDNA levels of CXCL1, GCSF, GMCSF, IL6, IL8, MIP1a and TGFa.

[0496] In some embodiments, the methods provided herein comprise measuring the cDNA levels of GCSF, CXCL1, IL6 and IL8.

[0497] In some embodiments, the methods provided herein comprise measuring the DNA level of CCL20, CCL22, CSF3(GCSF), CXCL1, CXCL2, CXCL3, CXCL5, CXCL6, IL6, IL8, PTGS2, CCL3, CCL4, CCL8, CFB, IL1B, and/or MMP3. In other embodiments, the methods provided herein comprise measuring the DNA level of GCSF, CXCL1, IL4, IL6, IL8, MDC, IP10, GMCSF, MIP1a and/or TGFa. In some embodiments, the methods provided herein comprise measuring the DNA level of CCL20. In some embodiments, the methods provided herein comprise measuring the DNA level of CCL22. In some embodiments, the methods provided herein comprise measuring the DNA level of CSF3. In some embodiments, the methods provided herein comprise measuring the DNA level of CXCL1. In some embodiments, the methods provided herein comprise measuring the DNA level of CXCL2. In some embodiments, the methods provided herein comprise measuring the DNA level of CXCL3. In some embodiments, the methods provided herein comprise measuring the DNA level of CXCL5. In some embodiments, the methods provided herein comprise measuring the DNA level of CXCL6. In some embodiments, the methods provided herein comprise measuring the DNA level of IL6. In some embodiments, the methods provided herein comprise measuring the DNA level of IL8. In some embodiments, the methods provided herein comprise measuring the DNA level of PTGS2. In some embodiments, the methods provided herein comprise measuring the DNA level of CCL3. In some embodiments, the methods provided herein comprise measuring the DNA level of CCL4. In some embodiments, the methods provided herein comprise measuring the DNA level of CCL8. In some embodiments, the methods provided herein comprise measuring the DNA level of CFB. In some embodiments, the methods provided herein comprise measuring the DNA level of IL1B. In some embodiments, the methods provided herein comprise measuring the DNA level of MMP3. In some embodiments, the methods provided herein comprise measuring the DNA level of GCSF. In some embodiments, the methods provided herein comprise measuring the DNA level of CXCL1. In some embodiments, the methods provided herein comprise measuring the DNA level of IL4. In some embodiments, the methods provided herein comprise measuring the DNA level of IL6. In some embodiments, the methods provided herein comprise measuring the DNA level of IL8. In some embodiments, the methods provided herein comprise measuring the DNA level of MDC. In some embodiments, the methods provided herein comprise measuring the DNA level of IP10. In some embodiments, the methods provided herein comprise measuring the DNA level of GMCSF. In some embodiments, the methods provided herein comprise measuring the DNA level of MIP1a. In some embodiments, the methods provided herein comprise measuring the DNA level of TGFa.

[0498] 5.5. Kits

[0499] In one aspect, provided herein is a kit for performing the methods provided herein. In some embodiments, the kit is for determining a pharmacodynamics or pharmacokinetic effect of an inhibitor of IL1α. In other embodiments, the kit is for identifying a subject who is likely to be responsive to a treatment comprising an inhibitor of IL1α. In other embodiments, the kit is for predicting the responsiveness of a subject to a treatment comprising an inhibitor of IL1α. In yet other embodiments, the kit is for monitoring the response of a subject to a treatment comprising an inhibitor of IL1α.

[0500] In some embodiments, the kit provided herein comprises one or more agents for measuring levels of one or more biomarkers in a sample selected from a group consisting of CCL20, CCL22, CSF3(GCSF), CXCL1, CXCL2, CXCL3, CXCL5, CXCL6, IL6, IL8, PTGS2, CCL3, CCL4, CCL8, CFB, IL1B, and MMP3, or from a group consisting of GCSF, CXCL1, IL4, IL6, IL8, MDC, IP10, GMCSF, MIP1a and TGFa.

[0501] In some embodiments, the kit comprises one or more agents for measuring the levels of one or more biomarkes in a sample, wherein the one or more biomarkers are selected from a group consisting of GCSF (CSF3), CXCL1, IL6, IL8, IL4, MDC, IP10, GMCSF (CSF2), MIP1a, TGFa, CCL20, CCL22, CXCL2, CXCL3, CXCL5, CXCL6, IL1B, PTGS2, CCL3, CCL4, CCL8, CFB, MMP3, FDCSP, PTX3, CCL3L3, CXCL8, FGF2, NEFM, TNIP3, MMP10, ADORA2A, DEFB4A, GPR84, AC243829.4, COLQ, TFPI2, SPRR2A, OXTR, CCL4L2, MMP1, TNFAIP6, HMX3, LIF, CD274, AC073862.2, TNFRSF11B, AC003092.1, SALL1, AC084871.4, CD38, NFKBIZ, ZC3H12A, SLC4A4, AL139393.3, MSC, SLC1A2, CCL2, GOS2, SLC34A2, AC073611.1, AC106865.1, AL078604.2, INHBA, LCN2, AC009303.4, TDO2, NGF, IER3, BCL2A1, SOD2, CEMIP, SAA1, TRAF1, GCH1, AC007780.1, AC007998.3, TMC1, GRM1, SPINK6, CD1D, IL17C, AC004264.1, EDNRB, DRAM1, CH25H, FOXD4L1, PTGES, SAA2, SLC39A14, RIPK2, PANX2, HS3ST3B1, IL23A, ROR1-AS1, AP002784.1, TMEM132A, ADAMTS5, OSM, RGS3, BMP6, STC1, SIRPA, RFX8, TMEM158, PAX1, IL24, ODAM, BCAT1, AC099494.2, ZNF697, C2CD4A, CCRL2, LAMA1, LSS, TGFB3, TM4SF1, CCL7, FFAR3, QPCTL, GRAMD1A, DNAJB5, ARSG, NRP2, INSM1, ICAM1, REP15, ACSL4, AC073862.5, LYN, AKR1C1, SDK1, THBS2, IL4I1, PILRA, SLC39A8, NEU4, MT1A, NRIP3, C2CD4B, ASPHD1, SLC11A1, SPRR2B, NFKB2, TNFRSF9, and NKX3-1.

[0502] In some embodiments, the kit comprises one or more agents for measuring the levels of one or more biomarkes in a sample, wherein the one or more biomarkers are selected from a group consisting of GCSF (CSF3), CXCL1, IL6, GMCSF (CSF2), CCL20, CCL22, CXCL2, CXCL3, CXCL5, IL1B, PTGS2, CCL3, CCL4, CCL8, CFB, MMP3, FDCSP, PTX3, CCL3L3, CXCL8, FGF2, NEFM, TNIP3, MMP10, ADORA2A, DEFB4A, GPR84, AC243829.4, COLQ, TFPI2, SPRR2A, OXTR, CCL4L2, MMP1, TNFAIP6, HMX3, LIF, CD274, AC073862.2, TNFRSF11B, AC003092.1, SALL1, AC084871.4, CD38, NFKBIZ, ZC3H12A, SLC4A4, AL139393.3, MSC, SLC1A2, CCL2, GOS2, SLC34A2, AC073611.1, AC106865.1, AL078604.2, INHBA, LCN2, AC009303.4, TDO2, NGF, IER3, BCL2A1, SOD2, CEMIP, SAA1, TRAF1, GCH1, AC007780.1, AC007998.3, TMC1, GRM1, SPINK6, CD1D, IL17C, AC004264.1, EDNRB, DRAM1, CH25H, FOXD4L1, PTGES, SAA2, SLC39A14, RIPK2, PANX2, HS3ST3B1, IL23A, ROR1-AS1, AP002784.1, TMEM132A, ADAMTS5, OSM, RGS3, BMP6, STC1, SIRPA, RFX8, TMEM158, PAX1, IL24, ODAM, BCAT1, AC099494.2, ZNF697, C2CD4A, CCRL2, LAMA1, LSS, TGFB3, TM4SF1, CCL7, FFAR3, QPCTL, GRAMD1A, DNAJB5, ARSG, NRP2, INSM1, ICAM1, REP15, ACSL4, AC073862.5, LYN, AKR1C1, SDK1, THBS2, IL4I1, PILRA, SLC39A8, NEU4, MT1A, NRIP3, C2CD4B, ASPHD1, SLC11A1, SPRR2B, NFKB2, TNFRSF9, and NKX3-1.

[0503] In some embodiments, the kit comprises an agent for measuring the level of CCL20. In some embodiments, the kit comprises an agent for measuring the level of CCL22. In some embodiments, the kit comprises an agent for measuring the level of CSF3. In some embodiments, the kit comprises an agent for measuring the level of CXCL1. In some embodiments, the kit comprises an agent for measuring the level of CXCL2. In some embodiments, the kit comprises an agent for measuring the level of CXCL3. In some embodiments, the kit comprises an agent for measuring the level of CXCL5. In some embodiments, the kit comprises an agent for measuring the level of CXCL6. In some embodiments, the kit comprises an agent for measuring the level of IL6. In some embodiments, the kit comprises an agent for measuring the level of IL8. In some embodiments, the kit comprises an agent for measuring the level of PTGS2. In some embodiments, the kit comprises an agent for measuring the level of CCL3. In some embodiments, the kit comprises an agent for measuring the level of CCL4. In some embodiments, the kit comprises an agent for measuring the level of CCL8. In some embodiments, the kit comprises an agent for measuring the level of CFB. In some embodiments, the kit comprises an agent for measuring the level of IL1B. In some embodiments, the kit comprises an agent for measuring the level of MMP3. In some embodiments, the kit comprises an agent for measuring the level of GCSF. In some embodiments, the kit comprises an agent for measuring the level of CXCL1. In some embodiments, the kit comprises an agent for measuring the level of IL4. In some embodiments, the kit comprises an agent for measuring the level of IL6. In some embodiments, the kit comprises an agent for measuring the level of IL8. In some embodiments, the kit comprises an agent for measuring the level of MDC. In some embodiments, the kit comprises an agent for measuring the level of IP10. In some embodiments, the kit comprises an agent for measuring the level of GMCSF. In some embodiments, the kit comprises an agent for measuring the level of MIP1a. In some embodiments, the kit comprises an agent for measuring the level of TGFa.

[0504] In one embodiment, the kit comprises an agent for measuring the level of CSF3 (GCSF). In another embodiment, the kit comprises an agent for measuring the level of CXCL1. In another embodiment, the kit comprises an agent for measuring the level of IL6.

[0505] In one embodiment, the kit comprises agents for measuring the levels of GCSF (CSF3), CXCL1, IL6, IL8, IL4, MDC, IP10, GMCSF (CSF2), MIP1a, TGFa, CCL20, CCL22, CXCL2, CXCL3, CXCL5, CXCL6, IL1B, PTGS2, CCL3, CCL4, CCL8, CFB, MMP3, FDCSP, PTX3, CCL3L3, CXCL8, FGF2, NEFM, TNIP3, MMP10, ADORA2A, DEFB4A, GPR84, AC243829.4, COLQ, TFPI2, SPRR2A, OXTR, CCL4L2, MMP1, TNFAIP6, HMX3, LIF, CD274, AC073862.2, TNFRSF11B, AC003092.1, SALL1, AC084871.4, CD38, NFKBIZ, ZC3H12A, SLC4A4, AL139393.3, MSC, SLC1A2, CCL2, GOS2, SLC34A2, AC073611.1, AC106865.1, AL078604.2, INHBA, LCN2, AC009303.4, TDO2, NGF, IER3, BCL2A1, SOD2, CEMIP, SAA1, TRAF1, GCH1, AC007780.1, AC007998.3, TMC1, GRM1, SPINK6, CD1D, IL17C, AC004264.1, EDNRB, DRAM1, CH25H, FOXD4L1, PTGES, SAA2, SLC39A14, RIPK2, PANX2, HS3ST3B1, IL23A, ROR1-AS1, AP002784.1, TMEM132A, ADAMTS5, OSM, RGS3, BMP6, STC1, SIRPA, RFX8, TMEM158, PAX1, IL24, ODAM, BCAT1, AC099494.2, ZNF697, C2CD4A, CCRL2, LAMA1, LSS, TGFB3, TM4SF1, CCL7, FFAR3, QPCTL, GRAMD1A, DNAJB5, ARSG, NRP2, INSM1, ICAM1, REP15, ACSL4, AC073862.5, LYN, AKR1C1, SDK1, THBS2, IL4I1, PILRA, SLC39A8, NEU4, MT1A, NRIP3, C2CD4B, ASPHD1, SLC11A1, SPRR2B, NFKB2, TNFRSF9, and NKX3-1.

[0506] In one embodiment, the kit comprises agents for measuring the levels of GCSF (CSF3), CXCL1, IL6, GMCSF (CSF2), CCL20, CCL22, CXCL2, CXCL3, CXCL5, IL1B, PTGS2, CCL3, CCL4, CCL8, CFB, MMP3, FDCSP, PTX3, CCL3L3, CXCL8, FGF2, NEFM, TNIP3, MMP10, ADORA2A, DEFB4A, GPR84, AC243829.4, COLQ, TFPI2, SPRR2A, OXTR, CCL4L2, MMP1, TNFAIP6, HMX3, LIF, CD274, AC073862.2, TNFRSF11B, AC003092.1, SALL1, AC084871.4, CD38, NFKBIZ, ZC3H12A, SLC4A4, AL139393.3, MSC, SLC1A2, CCL2, GOS2, SLC34A2, AC073611.1, AC106865.1, AL078604.2, INHBA, LCN2, AC009303.4, TDO2, NGF, IER3, BCL2A1, SOD2, CEMIP, SAA1, TRAF1, GCH1, AC007780.1, AC007998.3, TMC1, GRM1, SPINK6, CD1D, IL17C, AC004264.1, EDNRB, DRAM1, CH25H, FOXD4L1, PTGES, SAA2, SLC39A14, RIPK2, PANX2, HS3ST3B1, IL23A, ROR1-AS1, AP002784.1, TMEM132A, ADAMTS5, OSM, RGS3, BMP6, STC1, SIRPA, RFX8, TMEM158, PAX1, IL24, ODAM, BCAT1, AC099494.2, ZNF697, C2CD4A, CCRL2, LAMA1, LSS, TGFB3, TM4SF1, CCL7, FFAR3, QPCTL, GRAMD1A, DNAJB5, ARSG, NRP2, INSM1, ICAM1, REP15, ACSL4, AC073862.5, LYN, AKR1C1, SDK1, THBS2, IL4I1, PILRA, SLC39A8, NEU4, MT1A, NRIP3, C2CD4B, ASPHD1, SLC11A1, SPRR2B, NFKB2, TNFRSF9, and NKX3-1.

[0507] In one embodiment, the kit comprises agents for measuring the levels of CCL20, CCL22, CSF3(GCSF), CXCL1, CXCL2, CXCL3, CXCL5, CXCL6, IL6, IL8, PTGS2, CCL3, CCL4, CCL8, CFB, IL1B, and MMP3.

[0508] In one embodiment, the kit comprises agents for measuring the levels of CCL20, CCL22, CSF3(GCSF), CXCL1, CXCL2, CXCL3, CXCL5, CXCL6, IL6, IL8, and PTGS2.

[0509] In one embodiment, the kit comprises agents for measuring the levels of CCL20, CCL3, CCL4, CCL8, CFB, CSF3(GCSF), CXCL1, CXCL2, CXCL3, CXCL5, IL1B, IL6, IL8, MMP3, and PTGS2.

[0510] In one embodiment, the kit comprises agents for measuring the levels of CCL20, CSF3(GCSF), CXCL1, CXCL2, CXCL3, CXCL5, IL6, IL8, and PTGS2.

[0511] In one embodiment, the kit comprises agents for measuring the levels of CSF3 (GCSF), CXCL1 and IL6.

[0512] In one embodiment, the kit comprises agents for measuring the levels of GCSF, CXCL1, IL4, IL6, IL8, MDC, IP10, GMCSF, MIP1a and TGFa.

[0513] In one embodiment, the kit comprises agents for measuring the levels of GCSF, CXCL1, IL4, IL6, IL8, MDC and IP10.

[0514] In one embodiment, the kit comprises agents for measuring the levels of CXCL1, GCSF, GMCSF, IL6, IL8, MIP1a and TGFa.

[0515] In one embodiment, the kit comprises agents for measuring the levels of GCSF, CXCL1, IL6 and IL8.

[0516] In some embodiments, the agent is for measuring the protein level of the above biomarker. In other embodiments, the agent is for measuring the mRNA level of the above biomarker. In other embodiments, the agent is for measuring the cDNA level of the above biomarker. In yet other embodiments, the agent is for measuring the DNA level of the above biomarker.

[0517] In some embodiments, the kit provided herein further comprises a control agent so that the effect of the tested inhibitor of IL1α can be compared to that of the control agent. In some embodiments, the control agent is a positive control agent that inhibits IL1α. In some embodiments, the positive control agent is an anti-IL1α antibody. In other embodiments, the control agent is a negative control agent that does not inhibit IL1α.

[0518] In some embodiments, the kit provided herein further comprises a tool suitable for obtaining a sample from a subject, for example, a tool suitable for obtaining a skin biopsy sample.

[0519] In some embodiments, the kit provided herein further comprises culture medium for culturing a sample obtained from a subject. In some embodiments, the culture medium is suitable for culturing a skin biopsy sample.

[0520] The kit provided herein can further comprises a tool or a device for administering an agent to a sample. Examples of such devices include, but are not limited to, syringes, drip bags, patches, and inhalers. Kits may further comprise pharmaceutically acceptable vehicles that can be used to administer one or more ingredients. For example, if an ingredient is provided in a solid form that must be reconstituted for parenteral administration, the kit can comprise a sealed container of a suitable vehicle in which the active ingredient can be dissolved to form a particulate-free sterile solution that is suitable for parenteral administration. Examples of pharmaceutically acceptable vehicles include, but are not limited to, water for injection USP; aqueous vehicles (such as, but not limited to, sodium chloride injection, Ringer's injection, dextrose injection, dextrose and sodium chloride injection, and lactated Ringer's injection); water-miscible vehicles (such as, but not limited to, ethyl alcohol, polyethylene glycol, and polypropylene glycol); and non-aqueous vehicles (such as, but not limited to, corn oil, cottonseed oil, peanut oil, sesame oil, ethyl oleate, isopropyl myristate, and benzyl benzoate).

[0521] The kit may also contain an instruction on how to use the kit and apply various components of the kit. The kit may also include instructions on how to interpret the measurement, e.g., by providing a reference level of the gene.

[0522] In certain embodiments, provided herein is a kit for detecting the mRNA level of one or more genes. In certain embodiments, the kit comprises one or more probes that bind specifically to the mRNAs of the one or more genes. In certain embodiments, the kit further comprises a washing solution. In certain embodiments, the kit further comprises reagents for performing a hybridization assay, mRNA isolation or purification means, detection means, as well as positive and negative controls. In certain embodiments, the kit further comprises an instruction for using the kit. The kit can be tailored for in-home use, clinical use, or research use.

[0523] In certain embodiments, provided herein is a kit for detecting the protein level of one or more genes. In certain embodiments, the kits comprises a dipstick coated with an antibody that recognizes the protein biomarker, washing solutions, reagents for performing the assay, protein isolation or purification means, detection means, as well as positive and negative controls. In certain embodiments, the kit further comprises an instruction for using the kit. The kit can be tailored for in-home use, clinical use, or research use.

[0524] Such a kit can employ, for example, a dipstick, a membrane, a chip, a disk, a test strip, a filter, a microsphere, a slide, a multi-well plate, or an optical fiber. The solid support of the kit can be, for example, a plastic, silicon, a metal, a resin, glass, a membrane, a particle, a precipitate, a gel, a polymer, a sheet, a sphere, a polysaccharide, a capillary, a film, a plate, or a slide. The biological sample can be, for example, a cell culture, a cell line, a tissue, an organ, an organelle, a biological fluid, a blood sample, a urine sample, or a skin sample.

[0525] In another embodiment, the kit comprises a solid support, nucleic acids attached to the support, where the nucleic acids are complementary to at least 20, 50, 100, 200, 350, or more bases of mRNA, and a means for detecting the expression of the mRNA in a biological sample.

[0526] In a specific embodiment, the kit comprises components for isolating RNA. In another specific embodiment, the kit comprises components for conducting RT-PCR, qRT-PCR, deep sequencing, or microarray.

[0527] In certain embodiments, the kits provided herein employ means for detecting the expression of a biomarker by qRT-PCR, microarray, flow cytometry, or immunofluorescence. In other embodiments, the expression of the biomarker is measured by ELISA-based methodologies or other similar methods known in the art.

[0528] In another specific embodiment, the kit comprises components for isolating protein. In another specific embodiment, the kit comprises components for conducting flow cytometry or ELISA.

[0529] In another aspect, provided herein are kits for determining level of a gene that supply the materials necessary to measure the abundance of one or more gene products (e.g., 1, 2, 3, 4, 5, 6, 7, 8, 9, 10, 11, 12, 13, 14, 15, 16, or more genes) provided herein. Such kits may comprise materials and reagents required for measuring RNA or protein. In some embodiments, such kits include microarrays, wherein the microarray is comprised of oligonucleotides and/or DNA and/or RNA fragments which hybridize to one or more gene products provided herein, or any combination thereof. In some embodiments, such kits may include primers for PCR of either the RNA product or the cDNA copy of the RNA product of the genes. In some embodiments, such kits may include primers for PCR as well as probes for qPCR. In some embodiments, such kits may include multiple primers and multiple probes, wherein some of the probes have different fluorophores so as to permit simultaneously measuring multiple gene products provided herein. In some embodiments, such kits may further include materials and reagents for creating cDNA from RNA. In some embodiments, such kits may include antibodies specific for the protein products of the gene provided herein. Such kits may additionally comprise materials and reagents for isolating RNA and/or proteins from a biological sample. In addition, such kits may include materials and reagents for synthesizing cDNA from RNA isolated from a biological sample. In some embodiments, such kits may include a computer program product embedded on computer readable media for predicting whether a patient is clinically sensitive to a compound. In some embodiments, the kits may include a computer program product embedded on a computer readable media along with instructions.

[0530] In some embodiments, such kits measure the expression of one or more nucleic acid products of the genes provided herein. In accordance with this embodiment, the kits may comprise materials and reagents that are necessary for measuring the expression of particular nucleic acid products of the genes provided herein. For example, a microarray or RT-PCR kit may be produced for a specific condition and contain only those reagents and materials necessary for measuring the levels of specific RNA transcript products of the genes provided herein, to predict whether a patient is clinically sensitive to a compound. Alternatively, in some embodiments, the kits can comprise materials and reagents necessary for measuring the expression of particular nucleic acid products of genes other than the genes provided herein. For example, in certain embodiments, the kits comprise materials and reagents necessary for measuring the expression levels of 1, 2, 3, 4, 5, 6, 7, 8, 9, 10, 11, 12, 13, 14, 15, 16, 17, 20, 25, 30, 35, 40, 45, 50, or more of the genes, in addition to reagents and materials necessary for measuring the expression levels of the genes provided herein. In other embodiments, the kits contain reagents and materials necessary for measuring the expression levels of at least 1, at least 2, at least 3, at least 4, at least 5, at least 6, at least 7, at least 8, at least 9, at least 10, or more of the genes provided herein, and 1, 2, 3, 4, 5, 10, 15, 20, 25, 30, 35, 40, 45, 50, 55, 60, 65, 70, 75, 80, 85, 90, 95, 100, 125, 150, 175, 200, 225, 250, 300, 350, 400, 450, or more genes that are not the genes provided herein.

[0531] For nucleic acid microarray kits, the kits generally comprise probes attached to a solid support surface. In one such embodiment, probes can be either oligonucleotides or longer probes including probes ranging from 150 nucleotides to 800 nucleotides in length. The probes may be labeled with a detectable label. In a specific embodiment, the probes are specific for one or more of the gene products of the biomarkers provided herein. The microarray kits may comprise instructions for performing the assay and methods for interpreting and analyzing the data resulting from performing the assay. The kits may also comprise hybridization reagents and/or reagents necessary for detecting a signal produced when a probe hybridizes to a target nucleic acid sequence. Generally, the materials and reagents for the microarray kits are in one or more containers. Each component of the kit is generally in its own suitable container.

[0532] In certain embodiments, a nucleic acid microarray kit comprises materials and reagents necessary for measuring the expression levels of 1, 2, 3, 4, 5, 6, 7, 8, 9, 10, 15, or more of the genes provided herein, or a combination thereof, in addition to reagents and materials necessary for measuring the expression levels of at least 1, at least 2, at least 3, at least 4, at least 5, at least 6, at least 7, at least 8, at least 9, at least 10, at least 15, at least 20, at least 25, at least 30, at least 35, at least 40, at least 45, at least 50, or more genes other than those of the genes provided herein. In other embodiments, a nucleic acid microarray kit contains reagents and materials necessary for measuring the expression levels of at least 1, at least 2, at least 3, at least 4, at least 5, at least 6, at least 7, at least 8, at least 9, at least 10, at least 15, or more of the genes provided herein, or any combination thereof, and 1, 2, 3, 4, 5, 10, 15, 20, 25, 30, 35, 40, 45, 50, 55, 60, 65, 70, 75, 80, 85, 90, 95, 100, 125, 150, 175, 200, 225, 250, 300, 350, 400, 450, or more genes that are not of the genes provided herein. In another embodiment, a nucleic acid microarray kit contains reagents and materials necessary for measuring the expression levels of at least 1, at least 2, at least 3, at least 4, at least 5, at least 6, at least 7, at least 8, at least 9, at least 10, at least 15, or more of the genes of the genes provided herein, or any combination thereof, and 1-10, 1-100, 1-150, 1-200, 1-300, 1-400, 1-500, 1-1000, 25-100, 25-200, 25-300, 25-400, 25-500, 25-1000, 100-150, 100-200, 100-300, 100-400, 100-500, 100-1000, or 500-1000 genes that are not the genes provided herein.

[0533] For quantitative PCR, the kits generally comprise pre-selected primers specific for particular nucleic acid sequences. The quantitative PCR kits may also comprise enzymes suitable for amplifying nucleic acids (e.g., polymerases such as Taq polymerase), deoxynucleotides, and buffers needed for amplification reaction. The quantitative PCR kits may also comprise probes specific for the nucleic acid sequences associated with or indicative of a condition. The probes may or may not be labeled with a fluorophore. The probes may or may not be labeled with a quencher molecule. In some embodiments, the quantitative PCR kits also comprise components suitable for reverse-transcribing RNA, including enzymes (e.g., reverse transcriptases such as AMV, MMLV, and the like) and primers for reverse transcription along with deoxynucleotides and buffers needed for reverse transcription reaction. Each component of the quantitative PCR kit is generally in its own suitable container. Thus, these kits generally comprise distinct containers suitable for each individual reagent, enzyme, primer and probe. Further, the quantitative PCR kits may comprise instructions for performing the reaction and methods for interpreting and analyzing the data resulting from performing the reaction.

[0534] For antibody-based kits, the kit can comprise, for example: (1) a first antibody (which may or may not be attached to a solid support) that binds to a peptide, polypeptide or protein of interest; and, optionally, (2) a second, different antibody that binds to either the first antibody or the peptide, polypeptide, or protein, and is conjugated to a detectable label (e.g., a fluorescent label, radioactive isotope, or enzyme). In a specific embodiment, the peptide, polypeptide, or protein of interest is associated with or indicative of a condition (e.g., a disease). The antibody-based kits may also comprise beads for conducting immunoprecipitation. Each component of the antibody-based kits is generally in its own suitable container. Thus, these kits generally comprise distinct containers suitable for each antibody and reagent. Further, the antibody-based kits may comprise instructions for performing the assay and methods for interpreting and analyzing the data resulting from performing the assay.

[0535] In certain embodiments of the methods and kits provided herein, solid phase supports are used for purifying proteins, labeling samples, or carrying out the solid phase assays. Examples of solid phases suitable for carrying out the methods disclosed herein include beads, particles, colloids, single surfaces, tubes, multi-well plates, microtiter plates, slides, membranes, gels, and electrodes. When the solid phase is a particulate material (e.g., a bead), it is, in one embodiment, distributed in the wells of multi-well plates to allow for parallel processing of the solid phase supports.

[0536] It is noted that any combination of the above-listed embodiments, for example, with respect to one or more reagents, such as, without limitation, nucleic acid primers, solid support, and the like, are also contemplated in relation to any of the various methods and/or kits provided herein.

[0537] Certain embodiments of the invention are illustrated by the following non-limiting examples.

### 6. EXAMPLES

[0538] The examples below are carried out using standard techniques, which are well known and routine to those of skill in the art, except where otherwise described in detail. The examples are intended to be merely illustrative.

### 6.1. Example 1

### Expression of IL1α can be Provoked in Skin Injury Ex Vivo Biopsy Explant Culture Model

[0539] This example illustrates an assay provided herein that enables measurements of pharmacodynamics and/or pharmacokinetic effects of an IL1α blocker (or an IL1α inhibitor).

[0540] Inflammation is an important response of the immune system to cellular stress, injury or infection with the purpose of restoring tissue homeostasis. IL1α, a member of the IL1 family of cytokines, is a potent inflammatory cytokine that is released early during the inflammatory response and function to further activate the process. IL1α has also been recently shown to mediate the skin injury induced inflammatory response (SID 2019 Abstract/Poster, MJ Turner, Indiana U). In this example, expression of IL1α was shown elevated in ex vivo skin biopsy explant-based assay. In summary, skin biopsies were obtained from healthy piece of skin and were cultured ex vivo (see FIG. 1A). As shown in FIG. 1B, level of IL1α was elevated in culture supernatant of skin biopsy explant cultured ex vivo for 4 hours or 24 hours following skin injury (induced by biopsy procedure).

### 6.2. Example 2

### Ex Vivo Biopsy Explant Culture Model can be Utilized to Evaluate Effects of IL1α Blockade on Skin Inflammatory Responses

[0541] Next, we assessed the feasibility of using the ex vivo biopsy explant culture model to measure the impact of IL1α blockade of skin inflammatory responses. Briefly, skin biopsies were obtained from healthy piece of skin and were cultured ex vivo with or without anti-IL1α antibody (R&D, clone 4414). The readouts to monitor inflammatory response were gene expression level in skin biopsy and cytokine level in the culture supernatant. The effects of using different biopsy size to set up the ex vivo biopsy explant culture model were evaluated. While larger skin biopsy is preferred from experimental purpose (increased cytokine secretion level with larger skin biopsy), small skin biopsy is preferred for clinical implementation. To assess the impact of skin biopsy size on the ability to measure effects of IL1α blockade, 3 mm, 4 mm and 6 mm skin biopsy were compared. Luminex analysis of the culture supernatant showed that the level of GCSF, CXCL1, IL6 and IL8 were very low in control (data not shown), were elevated following 4 hours of culture and were significantly reduced by treatment with anti-IL1α antibody (see FIG. 2B). While treatment with anti-IL1α antibody significantly reduced cytokine level in all the biopsy size evaluated, the dynamic range (difference between 4 hr and 4 hr+anti-IL1α) was much smaller in 3 mm biopsy size. On the other hand, the range was larger and was similar between 4 mm and 6 mm biopsy size. Thus, 4 mm biopsy size was used in the subsequent development of the assay.

### 6.3. Example 3

### Lidocaine Injection Affects the Ability of Anti-IL1α to Reduce Level of GCSF, CXCL1 and IL8 in Culture Supernatant at 4-Hour, but Not at 24-Hour Time Point

[0542] In the clinic, local anesthetic (injection of 1% lidocaine) is usually used to numb the skin prior to the biopsy procedure. To evaluate the effects of lidocaine injection on the ex vivo biopsy explant culture model, experiments were set up utilizing skin that has been injected with 1 mL of 1% lidocaine or with 1 mL of PBS (control). As shown in FIG. 3, the result suggested that lidocaine can potentially impact the ability of anti-IL1α to reduce level of cytokines in culture supernatant, including GCSF, CXCL1 and IL8 at 4-hour time point; % reduction by anti-IL1α in the lidocaine group showed a trend of being lower compared to the PBS group (though not statistically significant). However, similar % reduction by anti-IL1α treatment was observed in both groups at 24-hour time point. Thus, in some embodiments, the ex vivo biopsy explant culture model provided herein utilizes 24-hour time point.

### 6.4. Example 4

### Anti IL1α Treatment Reduces Elevated Level of Certain Cytokines in Supernatant of Ex Vivo Biopsy Explant Culture Model at 24-Hour Time Point

[0543] Analysis of the culture supernatant collected from ex vivo biopsy explant culture model (with lidocaine injection) at 24-hour time point identified GCSF, CXCL1, IL4, IL6, IL8, MDC and IP10 as potential biomarkers for measuring effects (e.g., pharmacodynamics effect) of anti-IL 1a treatment in this model. The levels of these cytokines were elevated following 24-hour culture and showed a trend of being reduced by anti-IL1α treatment (see FIGS. 4A and 4B).

[0544] The ex vivo biopsy explant culture model was further evaluated in 10 healthy volunteers. In brief, 3 skin biopsies (4 mm) were collected from each healthy volunteer under sterile conditions after a local anesthetic agent (lidocaine) injection. One of the biopsies was used as control while the other two biopsies were cultured ex vivo for 24 hours and used to assess effects of anti-IL1α treatment (one of the two biopsies were cultured with anti-IL1a; R&D, clone 4414, 10 ug/mL). Culture supernatant were collected for cytokines measurement while the skin biopsies were used for gene expression analysis. Luminex analysis of the culture supernatant showed the induction of various cytokines following 24 hour of culture (FIG. 4C) and that treatment with anti-IL1α can reduce the level of a subset of cytokines (FIG. 4D). CXCL1, GCSF, GMCSF, IL6, IL8, MIP1a and TGFa were identified as potential biomarkers to measure PD effect of anti IL1α treatment. The level of these cytokines were reduced by anti-IL1a treatment (>50% inhibition) and display low variance (<100%) in their inhibition response. (FIG. 4D). The induction fold change (FIG. 4E) and concentration (FIG. 4F) of these cytokines in the 10 healthy volunteers were plotted.

### 6.5. Example 5

### Anti IL1α Treatment Reduces Elevated Expression Levels of Certain Genes in Ex Vivo Biopsy Explant Culture Model (With Lidocaine Injection) at 24-Hour Time Point

[0545] Gene expression of 249 genes in ex vivo biopsy explant culture model (with lidocaine injection) were measured using Nanostring platform. 40 of the 249 tested genes were induced at 24-hour time point, with geometric mean of fold change>2 among skin samples derived from three donors. Surprisingly, elevated gene expression in 11 of the 40 induced genes was inhibited by anti-IL1α treatment, with an average of inhibition>30% (see FIGS. 5A and 5B); these 11 genes were defined as IL1α signature for measuring effects (e.g., pharmacodynamics) of anti-IL1α treatment, e.g., in this model.

[0546] The 11 genes identified are listed in the table below.

| Gene | Accession # | SEQ ID NO: |
|---|---|---|
| CCL20 | NM_004591.1 | 1 |
| CCL22 | NM_002990.3 | 2 |
| CSF3 | NM_000759.2 | 3 |
| CXCL1 | NM_001511.1 | 4 |
| CXCL2 | NM_002089.3 | 5 |
| CXCL3 | NM_002090.2 | 6 |
| CXCL5 | NM_002994.3 | 7 |
| CXCL6 | NM_002993.3 | 8 |
| IL6 | NM_000600.1 | 9 |
| IL8 | NM_000584.2 | 10 |
| PTGS2 | NM_000963.1 | 11 |

[0547] In a further study, RNA expression of 249 genes, in addition to 6 housekeeping genes, 8 negative genes, and 6 positive genes, were measured using Nanostring in 30 skin biopsies from ten donors, with three skin biopsies per donor. For each donor, one biopsy was assayed right after collection (control), the second biopsy was cultured for 24 hour (24 hr), and the third biopsy was culture for 24 hour with the presence of anti-IL1α antibody (24 hr+anti-IL1a).

[0548] The 30 skin biopsies from ten donors were assayed in three runs, with up to 12 samples from four donors assayed in one run. The lower limit of detection (LLOD) across all samples in one run were determined as the maximal value of the reads of the 8 negative genes among all tested samples. Quantification (reads) below LLOD in any one of the 249 genes in each sample were assigned as the LLOD.

[0549] After setting the LLOD, quantification (reads) of 249 genes in each sample was further normalized across all 30 samples, by the geometric mean of the reads of all 249 genes to ensure the geometric means are the same across all samples after normalization.

[0550] Log 2 transformation was applied on normalized reads, and differential gene expression between two comparing conditions was evaluated using paired t test on log2 transformed normalized reads, followed by multiple comparison correction using false discovery rate (FDR).

[0551] Among the 249 genes evaluated, 25 genes were induced after 24-hour culture (vs control) with fold change>2 in each of the 10 donors. The % inhibition by IL1α antibody on induced expression of the 25 cut-induced genes were further calculated in each donor. 15 of the 25 induced genes had the average of inhibition (among the 10 donors)>30%, and were defined as IL1α signature (see FIG. 5C, FIG. 5D, and FIG. 5E). The 15 genes identified are listed in the table below.

| Gene | Accession # | SEQ ID NO: |
|---|---|---|
| CCL20 | NM_004591.1 | 1 |
| CCL3 | NM_002983.2 | 12 |
| CCL4 | NM_002984.2 | 13 |
| CCL8 | NM_005623.2 | 14 |
| CFB | NM_001710.5 | 15 |
| CSF3 | NM_000759.2 | 3 |
| CXCL1 | NM_001511.1 | 4 |
| CXCL2 | NM_002089.3 | 5 |
| CXCL3 | NM_002090.2 | 6 |
| CXCL5 | NM_002994.3 | 7 |
| IL1B | NM_000576.2 | 17 |
| IL6 | NM_000600.1 | 9 |
| IL8 | NM_000584.2 | 10 |
| MMP3 | NM_002422.3 | 18 |
| PTGS2 | NM_000963.1 | 1 |

[0552] The sequences of the above mentioned genes are as follows:

[0553] Homo sapiens chemokine (C-C motif) ligand 20 (CCL20), mRNA (NCBI Reference Sequence: NM_004591.1)—SEQ ID NO: 1.

[0554] Homo sapiens chemokine (C-C motif) ligand 22 (CCL22), mRNA (NCBI Reference Sequence: NM_002990.3)—SEQ ID NO: 2.

[0555] Homo sapiens colony stimulating factor 3 (granulocyte) (CSF3), transcript variant 1, mRNA (NCBI Reference Sequence: NM_000759.2)—SEQ ID NO: 3.

[0556] Homo sapiens chemokine (C-X-C motif) ligand 1 (melanoma growth stimulating activity, alpha) (CXCL1), mRNA (NCBI Reference Sequence: NM_001511.1)—SEQ ID NO: 4.

[0557] Homo sapiens C-X-C motif chemokine ligand 2 (CXCL2), mRNA (NCBI Reference Sequence: NM_002089.3)—SEQ ID NO: 5.

[0558] Homo sapiens C-X-C motif chemokine ligand 3 (CXCL3), mRNA (NCBI Reference Sequence: NM_002090.2)—SEQ ID NO: 6.

[0559] Homo sapiens chemokine (C-X-C motif) ligand 5 (CXCLS), mRNA (NCBI Reference Sequence: NM_002994.3)—SEQ ID NO: 7.

[0560] Homo sapiens C-X-C motif chemokine ligand 6 (CXCL6), mRNA (NCBI Reference Sequence: NM_002993.3)—SEQ ID NO: 8.

[0561] Homo sapiens interleukin 6 (interferon, beta 2) (IL6), mRNA (NCBI Reference Sequence: NM_000600.1)—SEQ ID NO: 9.

[0562] Homo sapiens interleukin 8 (IL8), mRNA (NCBI Reference Sequence: NM_000584.2)—SEQ ID NO: 10.

[0563] Homo sapiens prostaglandin-endoperoxide synthase 2 (prostaglandin G/H synthase and cyclooxygenase) (PTGS2), mRNA (NCBI Reference Sequence: NM_000963.1)—SEQ ID NO: 11.

[0564] Homo sapiens C-C motif chemokine ligand 3 (CCL3), mRNA, NCBI Reference Sequence: NM_002983.2—SEQ ID NO: 12.

[0565] Homo sapiens chemokine (C-C motif) ligand 4 (CCL4), mRNA, NCBI Reference Sequence: NM_002984.2—SEQ ID NO: 13.

[0566] Homo sapiens C-C motif chemokine ligand 8 (CCL8), mRNA, NCBI Reference Sequence: NM_005623.2—SEQ ID NO: 14.

[0567] Homo sapiens complement factor B (CFB), mRNA, NCBI Reference Sequence: NM_001710.5—SEQ ID NO: 15.

[0568] Homo sapiens C-X-C motif chemokine ligand 2 (CXCL2), mRNA, NCBI Reference Sequence: NM_002089.3—SEQ ID NO: 16.

[0569] Homo sapiens interleukin 1 beta (IL1B), mRNA, NCBI Reference Sequence: NM_000576.2—SEQ ID NO: 17.

[0570] Homo sapiens matrix metallopeptidase 3 (MMP3), mRNA, NCBI Reference Sequence: NM_002422.3—SEQ ID NO: 18.

[0571] In a further study, whole genome transcriptome in the same 30 skin biopsies were generated using RNAseq. Sequencing libraries were constructed using NEBNext Ultra RNA Library Prep Kit, and the RNAseq data were generated with 60 million paired end reads (2×150 bp, Novogene Corporation Inc.)

[0572] Quantification of gene expression in each sample is determined as Transcripts Per Million reads (TPM) using RNA-Seq pipeline in OmicSoft Studio (QIAGEN), by choosing Genome Reference Consortium Human Build 38 (GRCh38) for alignment and OmicsoftGenCode.V33 as the gene model (60,699 genes in total).

[0573] Log 2 transformation was applied on TPM (after flooring at 0.1), and differential gene expression between two conditions being compared was evaluated using generalized linear model (GLM) on log2 transformed TPM, followed by multiple comparison correction using false discovery rate (FDR).

[0574] Among the 60,699 genes evaluated, 2050 genes were induced after 24-hour culture (vs control) with geometric average of fold change>2 among the 10 donors, and FDR<0.05; 1287 of these 2050 genes were induced (fold change>1.5) in each of the 10 donors

[0575] The % inhibition by IL1α antibody on induced expression of the 1287 injury-induced genes were further calculated in each donor. 139 of the 1287 induced genes had the average of inhibition (among the 10 donors)>20%, and were defined as IL1α RNAseq signature (see FIG. 6). The 139 genes identified are listed in the table below.

| | | Injury | % Inhibi- | |
|---|---|---|---|---|
| | | Fold | tion by | SEQ |
| GeneID | GeneName | Change | antiIL1a | ID NO: |
| ENSG00000164400.6 | CSF2 | 16 | 75 | 19 |
| ENSG00000181617.6 | FDCSP | 84 | 73 | 20 |
| ENSG00000108342.12 | CSF3 | 2635 | 65 | 21 |
| ENSG00000277632.2 | CCL3 | 253 | 62 | 22 |
| ENSG00000163661.4 | PTX3 | 147 | 60 | 23 |
| ENSG00000276085.1 | CCL3L3 | 175 | 59 | 24 |
| ENSG00000125538.12 | IL1B | 45 | 59 | 25 |
| ENSG00000275302.2 | CCL4 | 45 | 58 | 26 |
| ENSG00000169429.11 | CXCL8 | 4065 | 53 | 27 |
| ENSG00000163734.4 | CXCL3 | 990 | 53 | 28 |
| ENSG00000138685.15 | FGF2 | 14 | 53 | 29 |
| ENSG00000163739.5 | CXCL1 | 1114 | 53 | 30 |
| ENSG00000163735.7 | CXCL5 | 957 | 52 | 31 |
| ENSG00000081041.9 | CXCL2 | 800 | 51 | 32 |
| ENSG00000104722.14 | NEFM | 13 | 50 | 33 |
| ENSG00000243649.9 | CFB | 9 | 50 | 34 |
| ENSG00000050730.16 | TNIP3 | 6 | 50 | 35 |
| ENSG00000115009.13 | CCL20 | 39 | 49 | 36 |
| ENSG00000166670.10 | MMP10 | 1478 | 49 | 37 |
| ENSG00000128271.22 | ADORA2A | 6 | 48 | 38 |
| ENSG00000171711.3 | DEFB4A | 172 | 47 | 39 |
| ENSG00000139572.4 | GPR84 | 17 | 46 | 40 |
| ENSG00000277089.4 | AC243829.4 | 6 | 46 | 41 |
| ENSG00000206561.13 | COLQ | 11 | 46 | 42 |
| ENSG00000105825.14 | TFPI2 | 107 | 44 | 43 |
| ENSG00000241794.2 | SPRR2A | 38 | 43 | 44 |
| ENSG00000180914.10 | OXTR | 5 | 43 | 45 |
| ENSG00000149968.12 | MMP3 | 2525 | 43 | 46 |
| ENSG00000276070.5 | CCL4L2 | 26 | 43 | 47 |
| ENSG00000073756.12 | PTGS2 | 533 | 42 | 48 |
| ENSG00000196611.5 | MMP1 | 22185 | 42 | 49 |
| ENSG00000123610.5 | TNFAIP6 | 105 | 42 | 50 |
| ENSG00000188620.11 | HMX3 | 9 | 42 | 51 |
| ENSG00000128342.5 | LIF | 81 | 42 | 52 |
| ENSG00000120217.14 | CD274 | 12 | 42 | 53 |
| ENSG00000279581.1 | AC073862.2 | 8 | 42 | 54 |
| ENSG00000136244.12 | IL6 | 10249 | 40 | 55 |
| ENSG00000164761.9 | TNFRSF11B | 13 | 39 | 56 |
| ENSG00000236453.5 | AC003092.1 | 9 | 39 | 57 |
| ENSG00000103449.12 | SALL1 | 5 | 38 | 58 |
| ENSG00000286256.2 | AC084871.4 | 3 | 38 | 59 |
| ENSG00000004468.13 | CD38 | 4 | 38 | 60 |
| ENSG00000144802.11 | NFKBIZ | 4 | 37 | 61 |
| ENSG00000163874.11 | ZC3H12A | 5 | 37 | 62 |
| ENSG00000080493.17 | SLC4A4 | 8 | 37 | 63 |
| ENSG00000108700.5 | CCL8 | 33 | 36 | 64 |
| ENSG00000272841.1 | AL139393.3 | 8 | 36 | 65 |
| ENSG00000178860.8 | MSC | 5 | 36 | 66 |
| ENSG00000110436.13 | SLC1A2 | 6 | 36 | 67 |
| ENSG00000108691.9 | CCL2 | 19 | 35 | 68 |
| ENSG00000123689.6 | G0S2 | 69 | 35 | 69 |
| ENSG00000157765.13 | SLC34A2 | 8 | 35 | 70 |
| ENSG00000257605.2 | AC073611.1 | 7 | 34 | 71 |
| ENSG00000250771.2 | AC106865.1 | 5 | 34 | 72 |
| ENSG00000237927.1 | AL078604.2 | 11 | 34 | 73 |
| ENSG00000122641.11 | INHBA | 30 | 34 | 74 |
| ENSG00000148346.12 | LCN2 | 5 | 34 | 75 |
| ENSG00000279227.1 | AC009303.4 | 3 | 33 | 76 |
| ENSG00000151790.9 | TDO2 | 9 | 33 | 77 |
| ENSG00000134259.4 | NGF | 19 | 33 | 78 |
| ENSG00000137331.12 | IER3 | 21 | 32 | 79 |
| ENSG00000140379.8 | BCL2A1 | 8 | 32 | 80 |
| ENSG00000112096.18 | SOD2 | 32 | 32 | 81 |
| ENSG00000103888.17 | CEMIP | 239 | 32 | 82 |
| ENSG00000173432.12 | SAA1 | 13 | 32 | 83 |
| ENSG00000056558.11 | TRAF1 | 4 | 32 | 84 |
| ENSG00000131979.19 | GCH1 | 4 | 31 | 85 |
| ENSG00000267009.6 | AC007780.1 | 13 | 31 | 86 |
| ENSG00000267583.5 | AC007998.3 | 6 | 31 | 87 |
| ENSG00000165091.17 | TMC1 | 3 | 31 | 88 |
| ENSG00000152822.14 | GRM1 | 5 | 31 | 89 |
| ENSG00000178172.7 | SPINK6 | 17 | 30 | 90 |
| ENSG00000158473.7 | CD1D | 8 | 30 | 91 |
| ENSG00000124391.5 | IL17C | 8 | 30 | 92 |
| ENSG00000268812.3 | AC004264.1 | 13 | 29 | 93 |
| ENSG00000136160.17 | EDNRB | 6 | 28 | 94 |
| ENSG00000136048.14 | DRAM1 | 8 | 28 | 95 |
| ENSG00000138135.7 | CH25H | 11 | 28 | 96 |
| ENSG00000184492.6 | FOXD4L1 | 4 | 28 | 97 |
| ENSG00000148344.11 | PTGES | 14 | 28 | 98 |
| ENSG00000134339.8 | SAA2 | 132 | 27 | 99 |
| ENSG00000104635.14 | SLC39A14 | 10 | 27 | 100 |
| ENSG00000104312.8 | RIPK2 | 3 | 27 | 101 |
| ENSG00000073150.14 | PANX2 | 4 | 27 | 102 |
| ENSG00000125430.9 | HS3ST3B1 | 4 | 26 | 103 |
| ENSG00000110944.9 | IL23A | 11 | 26 | 104 |
| ENSG00000223949.7 | ROR1-AS1 | 4 | 26 | 105 |
| ENSG00000250519.7 | AP002784.1 | 7 | 26 | 106 |
| ENSG00000006118.14 | TMEM132A | 5 | 26 | 107 |
| ENSG00000154736.6 | ADAMTS5 | 7 | 26 | 108 |
| ENSG00000099985.4 | OSM | 24 | 26 | 109 |
| ENSG00000138835.22 | RGS3 | 3 | 26 | 110 |
| ENSG00000153162.9 | BMP6 | 5 | 26 | 111 |
| ENSG00000159167.12 | STC1 | 389 | 26 | 112 |
| ENSG00000198053.11 | SIRPA | 3 | 25 | 113 |
| ENSG00000196460.14 | RFX8 | 8 | 25 | 114 |
| ENSG00000249992.2 | TMEM158 | 3 | 25 | 115 |
| ENSG00000125813.13 | PAX1 | 10 | 25 | 116 |
| ENSG00000162892.16 | IL24 | 201 | 25 | 117 |
| ENSG00000109205.16 | ODAM | 10 | 25 | 118 |
| ENSG00000060982.15 | BCAT1 | 3 | 25 | 119 |
| ENSG00000279415.1 | AC099494.2 | 4 | 25 | 120 |
| ENSG00000143067.5 | ZNF697 | 3 | 25 | 121 |
| ENSG00000198535.5 | C2CD4A | 82 | 25 | 122 |
| ENSG00000121797.10 | CCRL2 | 6 | 25 | 123 |
| ENSG00000101680.15 | LAMA1 | 18 | 24 | 124 |
| ENSG00000160285.15 | LSS | 2 | 24 | 125 |
| ENSG00000119699.7 | TGFB3 | 4 | 24 | 126 |
| ENSG00000169908.12 | TM4SF1 | 7 | 24 | 127 |
| ENSG00000108688.11 | CCL7 | 81 | 24 | 128 |
| ENSG00000185897.7 | FFAR3 | 7 | 24 | 129 |
| ENSG00000011478.12 | QPCTL | 3 | 24 | 130 |
| ENSG00000089351.14 | GRAMD1A | 4 | 23 | 131 |
| ENSG00000137094.14 | DNAJB5 | 3 | 23 | 132 |
| ENSG00000141337.12 | ARSG | 3 | 23 | 133 |
| ENSG00000118257.16 | NRP2 | 6 | 23 | 134 |
| ENSG00000173404.5 | INSM1 | 3 | 22 | 135 |
| ENSG00000090339.9 | ICAM1 | 6 | 22 | 136 |
| ENSG00000102962.5 | CCL22 | 9 | 22 | 137 |
| ENSG00000174236.4 | REP15 | 6 | 22 | 138 |
| ENSG00000068366.20 | ACSL4 | 4 | 22 | 139 |
| ENSG00000280200.1 | AC073862.5 | 11 | 22 | 140 |
| ENSG00000254087.8 | LYN | 2 | 22 | 141 |
| ENSG00000187134.14 | AKR1C1 | 10 | 22 | 142 |
| ENSG00000146555.19 | SDK1 | 3 | 21 | 143 |
| ENSG00000186340.15 | THBS2 | 6 | 21 | 144 |
| ENSG00000104951.16 | IL4I1 | 14 | 21 | 145 |
| ENSG00000085514.16 | PILRA | 3 | 21 | 146 |
| ENSG00000138821.13 | SLC39A8 | 4 | 21 | 147 |
| ENSG00000204099.11 | NEU4 | 14 | 21 | 148 |
| ENSG00000205362.11 | MT1A | 12 | 21 | 149 |
| ENSG00000175352.11 | NRIP3 | 5 | 21 | 150 |
| ENSG00000205502.4 | C2CD4B | 19 | 20 | 151 |
| ENSG00000174939.11 | ASPHD1 | 4 | 20 | 152 |
| ENSG00000018280.17 | SLC11A1 | 14 | 20 | 153 |
| ENSG00000196805.7 | SPRR2B | 36 | 20 | 154 |
| ENSG00000077150.20 | NFKB2 | 4 | 20 | 155 |
| ENSG00000049249.8 | TNFRSF9 | 4 | 20 | 156 |
| ENSG00000167034.10 | NKX3-1 | 9 | 20 | 157 |

### 6.6. Example 6

### Bermekimab Reduces Elevated Level of a Subset of Induced Cytokines in Ex Vivo Biopsy Explant Culture Model at 24-Hour Time Point

[0576] Bermekimab was evaluated in the ex vivo biopsy explant culture assay in 3 healthy skin donors. Bermekimab was tested at various doses (10000, 1000, 100, 10, 1, 0.1 and 0.01 ng/mL; no lidocaine injection was used in this experiment). Commercially available anti-IL1a from R&D (clone 4414, 10 ug/mL) that was utilized to establish the assay and in the studies described above was also included in this experiment. Culture supernatant were collected for cytokines measurement using Luminex while the skin biopsies were used for gene expression analysis in Nanostring. Measurement of cytokine level in the supernatant showed that bermekimab can reduce the level of GCSF, CXCL1, IL6 and IL8 in a dose responsive manner (see FIG. 7A), and the corresponding IC50 values were calculated. While bermekimab can also reduce the level of IL6, IC50 values can be calculated only in 1 out of the 3 donors evaluated. IC50 values from 3 healthy donors are summarized in the table below.

| IC50 (ng/mL) | Donor 1 | Donor 2 | Donor 3 |
|---|---|---|---|
| GCSF | 1.27 | 5.86 | 0.29 |
| CXCL1 | 6.93 | 20.58 | 28.41 |
| IL6 | 4.01 | — | — |
| IL8 | 1.51 | 10.82 | 2.25 |

[0577] Cultured skin biopsies were also collected for further analysis. Skin tissues were processed to generate lysate and the level of cytokines were analyzed similarly using Luminex. Similar to observations in the supernatant, bermekimab can reduce the level of CXCL1, IL6 and IL8 in the skin tissue lysate and the corresponding IC50 values can then be calculated (see FIG. 7B). Unlike in the supernatant, the level of GCSF was not measurable in the tissue lysate.

### 6.7. Example 7

### A Phase 1 Study to Investigate the Pharmacokinetics and Pharmacodynamics of Bermekimab in Healthy Participants

[0578] This is an open-label, interventional study in healthy participants. Single doses of bermekimab are administered. Three doses of anakinra, the positive PD control, are administered.

[0579] There are single-dose SC cohorts and 3 single-dose IV cohorts. Participants are enrolled into either the SC cohorts (400 mg dose at concentrations of 100, 150, 175, and 200 mg/mL; 200 and 800 mg dose at concentration 175 mg/mL) or the IV cohorts (400, 800, and 1,200 mg at 100 mg/mL). There is also a cohort of that receives a 100 mg SC dose of anakinra daily for 3 days to be used as a PD comparator.

[0580] The total duration of participation is approximately 16 weeks, including a screening visit up to 28 days prior to study intervention administration. Participants have an inpatient period consisting of 9 days/8 nights. Participants return to the study site at Weeks 2, 3, 4, 6, 8, and 12.

Description of Interventions

| Intervention Name | bermekimab | Anakinra |
|---|---|---|
| Dose Formulation | Liquid formulation; | Anakinra is supplied in single-use |
| | bermekimab; Trehalose | preservative free, prefilled glass |
| | Dihydrate; Sodium Phosphate | syringes with 29-gauge needles. |
| | Dibasic; Citric Acid | Each prefilled glass syringe contains |
| | Monohydrate, Phosphoric Acid; | 100 mg of anakinra per 0.67 mL. |
| | Sodium Hydroxide, Water for | The full syringe contains 100 mg |
| | Injection | anakinra. |
| | | Citric acid, anhydrous; Sodium |
| | | chloride; Di sodium edetate |
| | | dihydrate; Polysorbate 80; Sodium |
| | | hydroxide; Water for injections |
| Unit Dose | Subcutaneous (SC): 100 mg/mL, | Injection: 100 mg/0.67 mL solution |
| Strength(s) | 150 mg/mL, 175 mg/mL, | in a single-use prefilled syringe for |
| | 200 mg/mL intravenous (IV): | SC injection. Graduated syringe |
| | 100 mg/mL | allows for doses between 20 and |
| | | 100 mg. |
| Dosage Level(s) | SC: 400 mg at 100 mg/mL, 400 | 100 mg |
| | mg at 150 mg/mL, 400 mg at | |
| | 175 mg/mL, 400 mg at | |
| | 200 mg/mL, 200 mg at | |
| | 175 mg/mL, 800 mg at 175 | |
| | mg/mL | |
| | IV: 400, 800, 1,200 mg | |
| Route of | SC injection and IV infusion | SC injection |
| Administration | | |

| | |
|---|---|
| Objectives | Assessments |

Primary

| | |
|---|---|
| To assess the pharmacokinetics (PK) of | PK parameters of bermekimab, including but |
| bermekimab after single subcutaneous (SC) or | not limited to Cₘₐₓ, AUC_{inf}, AUCₗₐₛₜ, T_{1/2} and |
| intravenous (IV) administrations and the effect | F(%) |
| of formulation concentrations on PK of | |
| bermekimab in healthy participants. | |

Secondary

| | |
|---|---|
| To evaluate safety, tolerability, and | Proportion of participants with treatment- |
| immunogenicity of a single SC or IV | emergent adverse events (TEAE) by severity |
| administration of bermekimab in healthy | and serious adverse events (SAE) through |
| participants. | Day 85. |
| | Clinically significant changes in vital signs, |
| | electrocardiograms (ECGs), hematology, |
| | chemistry, and urinalysis. |
| | Presence of antibodies to bermekimab. |

Exploratory

| | |
|---|---|
| To assess pharmacodynamic (PD) modulation | Biopsy, incubation, and molecular endpoint |
| of interleukin-1 alpha (IL-1α) in comparison to | assessment in skin biopsies and secreted |
| a known antagonist of IL-1α and β by | cytokines before and after treatment with |
| provoking the release of IL-1α in healthy skin | bermekimab or anakinra. |
| and assessing the effect of blockade on | |
| downstream PD readouts. | |

[0581] This study employs a 2-wave dosing scheme. Wave 1 consists of Cohorts A through E and Wave 2 consists of Cohorts F through J. The cohorts in Wave 1 are randomized and dosed in a parallel manner according to site logistics. The cohorts in Wave 2 are not randomized but are enrolled in sequential order, ie, Cohort F is fully enrolled before starting Cohort G enrollment and so on.

| Wave 1 (Randomized | Wave 2 (Non-Randomized |
|---|---|
| Parallel Cohorts) | Sequential Cohorts) |
| Cohort A - 400 mg SC | Cohort F - 200 mg SC |
| (formulation: 100 mg/mL) | (formulation: 175 mg/mL) |
| Cohort B - 400 mg SC | Cohort G - 800 mg SC |
| (formulation: 150 mg/mL) | (formulation: 175 mg/mL) |
| Cohort C - 400 mg SC | Cohort H - 800 mg IV |
| (formulation: 175 mg/mL) | (formulation: 100 mg/mL) |
| Cohort D - 400 mg SC | Cohort I - 1,200 mg IV |
| (formulation: 200 mg/mL) | (formulation: 100 mg/mL) |
| Cohort E - 400 mg IV | Cohort J - 100 mg SC |
| (formulation: 100 mg/mL) | anakinra |

[0582] FIG. 8 is a schematic summarizing the design of the Phase 1 study.

### Pharmacokinetics

[0583] Serum and plasma samples are analyzed to determine concentrations of bermekimab using a validated, specific, and sensitive immunoassay method.

[0584] Pharmacokinetic parameters of bermekimab are calculated from concentrations over time data using noncompartmental analyses. Pharmacokinetic parameters following a single IV or SC administration of bermekimab include, but are not limited to:

### IV Only:

[0585] Cₘₐₓ: maximum observed plasma concentration.
[0586] AUC_{inf}: area under the plasma concentration versus time curve from time zero to infinity with extrapolation of the terminal phase.
[0587] AUCₗₐₛₜ: area under the plasma concentration versus time curve from time zero to the time corresponding to the last quantifiable concentration.
[0588] T_{1/2}: terminal half-life.
[0589] CL: total systemic clearance.
[0590] V_{z}: volume of distribution based on terminal phase.

### SC Only:

[0591] Cₘₐₓ: maximum observed plasma concentration.
[0592] Tₘₐₓ: time to reach maximum observed plasma concentration.
[0593] AUC_{inf}: area under the plasma concentration versus time curve from time zero to infinity with extrapolation of the terminal phase.
[0594] AUCₗₐₛₜ: area under the plasma concentration versus time curve from time zero to the time corresponding to the last quantifiable concentration.
[0595] T_{1/2}: terminal half-life.
[0596] CL/F: apparent total systemic clearance after extravascular administration.
[0597] V_{z}/F: apparent volume of distribution based on terminal phase after extravascular administration.
[0598] F(%): absolute SC bioavailability to be calculated using the following equation.

$$F ( \% ) = \frac{A U {C}_{inf , SC}}{mean A U {C}_{inf , IV}} \times 100 \%$$

### Pharmacodynamics

[0599] Participants are required to have 4, 4-mm skin punch biopsies of normal healthy skin (2 pre- and 2 posttreatment). Assessing the pattern of gene expression and protein production in the skin biopsies allows measurement of PD effect of bermekimab or anakinra (which serves as a positive control) on molecular events that have an established dependence on IL-1α. At each skin biopsy collection visit, one skin biopsy is processed immediately as per skin biopsy lab manual and the second skin biopsy is cultured ex vivo for 24 hours to establish the stimulation baseline for each participant (the stimulus is the skin biopsy procedure itself). The third and fourth skin biopsies are collected after bermekimab administration and 1 skin biopsy specimen is processed immediately as per skin biopsy laboratory manual and the second skin biopsy specimen is cultured ex vivo for 24 hours. The effects of bermekimab or anakinra dosing on gene and protein expression patterns induced as a result of the tissue injury from the skin biopsy collection procedure are determined by comparing changes relative to baseline in predefined gene expression signatures and secreted proteins in the supernatants. Skin biopsy specimens are assessed for gene expression and for secreted proteins accumulation in ex vivo culture supernatants.

[0600] Data from skin biopsy samples is analyzed to evaluate PD effects of each intervention on the induction of gene expression changes and secreted protein levels in response to the wounding process (biopsy procedure). Pharmacodynamic data is presented using suitable descriptive statistics for each intervention, comparing PD readouts in ex vivo-cultured pretreatment biopsies versus ex vivo-cultured posttreatment biopsies (biopsy samples that are not cultured ex vivo serve as control for changes occurring during ex vivo incubation). For each PD parameter (e.g., expression levels of select genes, concentrations of protein readouts; % inhibition), summary plots (e.g., mean and standard deviation or median and interquartile ranges) of absolute levels and changes from pretreatment are generated for each cohort.

[0601] Thus, these studies identified a set of biomarkers (e.g., secreted cytokines and gene signature) to monitor and assess effects (e.g., pharmacodynamics and/or pharmacokinetic effects) of an IL1α inhibitor among other uses.

[0602] From the foregoing, it will be appreciated that, although specific embodiments have been described herein for the purpose of illustration, various modifications may be made without deviating from the spirit and scope of what is provided herein. All of the references referred to above are incorporated herein by reference in their entireties.

What is claimed is:

1. A method of determining a pharmacodynamics or pharmacokinetic effect of an inhibitor of IL1α comprising:
i. providing a sample from a subject;
ii. administering the inhibitor of IL1α to the sample;
iii. measuring levels of one or more biomarkers in the sample;
iv. determining the pharmacodynamic or the pharmacokinetic effect of the inhibitor of IL1α based on the levels of the one or more biomarkers as measured in step (iii).

2. A method of monitoring the response of a subject to a treatment comprising an inhibitor of IL1α, comprising:
i. providing a sample from the subject;
ii. administering the inhibitor of IL1α to the sample;
iii. measuring levels of one or more biomarkers in the sample;
iv. monitoring the response of the subject to a treatment comprising the inhibitor of IL1α, based on the levels of the one or more biomarkers as measured in step (iii).

3. The method of claim 1 or claim 2, wherein the sample comprises a skin cell.

4. The method of any one of claims 1 to 3, wherein the sample comprises an injured skin cell.

5. The method of any one of claims 1 to 3, wherein the sample is obtained by a skin biopsy procedure.

6. The method of claim 5, wherein the size of the sample is about 3.5 mm to 4.5 mm, wherein optionally the size of the sample is about 4.0 mm.

7. The method of any one of claims 1 to 6 further comprising culturing the sample ex vivo prior to administering the inhibitor of IL1α to the sample.

8. The method of any one of claims 1 to 6 further comprising culturing the sample ex vivo after administering the inhibitor of IL1α to the sample.

9. The method of any one of claims 1 to 6, wherein the inhibitor of IL1α is administered to the sample while culturing the sample ex vivo.

10. The method of any one of claims 1 to 9, wherein the levels of the one or more biomarkers are measured at least 4 hours, at least 5 hours, at least 10 hours, at least 15 hours, at least 20 hours, at least 21 hours, at least 22 hours, at least 23 hours, or at least 24 hours post the administration of the inhibitor of IL1α and/or post the sample is obtained from the subject.

11. The method of any one of claims 1 to 9, wherein the level of the one or more biomarkers are measured at about 24 hours or at least 24 hours post the administration of the inhibitor of IL1α or post the sample is obtained from the subject.

12. The method of any one of claims 1 to 11, further comprising comparing the levels of the one or more biomarkers with reference levels of the one or more biomarkers.

13. The method of claim 12, wherein the reference levels of the one or more biomarkers are the levels of the one or more biomarkers in a reference sample from the subject prior to administration of the inhibitor of IL1α.

14. The method of claim 12, wherein the reference levels of the one or more biomarkers are the levels of the one or more biomarkers in a reference sample from the subject without administration of the inhibitor of IL1α.

15. The method of claim 12, wherein the reference levels of the one or more biomarkers are pre-determined levels of the one or more biomarkers.

16. The method of claim 12, wherein the reference levels of the one or more biomarkers are the levels of the one or more biomarkers in a reference sample administered with a control agent.

17. The method of claim 16, wherein the control agent is a positive control agent that inhibits IL1α, for example the anti-IL1α antibody from R&D Systems (clone 4414).

18. The method of claim 16, wherein the control agent is a negative control agent that does not inhibit IL1α.

19. The method of any one of claims 13 to 16 and 18, wherein the lower levels of the one or more biomarkers as compared with reference levels of the one or more biomarkers indicates the subject is likely to be responsive to the treatment comprising the inhibitor of IL1α, or wherein the subject is identified likely to be responsive to the treatment comprising the inhibitor of IL1α if the levels of the one or more biomarkers in the sample are at least 30%, at least 35%, at least 40%, or at least 50% less than the reference levels.

20. The method of any one of claims 1 to 19, wherein the levels of the one or more biomarkers are the expression levels of one or more biomarkers selected from a group consisting of CCL20, CCL22, CSF3(GCSF), CXCL1, CXCL2, CXCL3, CXCL5, CXCL6, IL6, IL8, PTGS2, CCL3, CCL4, CCL8, CFB, IL1B, and MMP3.

21. The method of any one of claims 1 to 19, wherein the levels of the one or more biomarkers are the expression levels of one or more biomarkers selected from a group consisting of CCL20, CCL22, CSF3(GCSF), CXCL1, CXCL2, CXCL3, CXCL5, CXCL6, IL6, IL8, and PTGS2.

22. The method of any one of claims 1 to 19, wherein the levels of the one or more biomarkers are the expression levels of one or more biomarkers selected from a group consisting of CCL20, CCL3, CCL4, CCL8, CFB, CSF3(GCSF), CXCL1, CXCL2, CXCL3, CXCL5, IL1B, IL6, IL8, MMP3, and PTGS2.

23. The method of claim 20, wherein the one or more biomarkers comprises CCL20.

24. The method of claim 20, wherein the one or more biomarkers comprises CCL22.

25. The method of claim 20, wherein the one or more biomarkers comprises CSF3, wherein optionally the one or more biomarkers comprise CSF3 (GCSF), CXCL1 and IL6.

26. The method of claim 20, wherein the one or more biomarkers comprises CXCL1.

27. The method of claim 20, wherein the one or more biomarkers comprises CXCL2.

28. The method of claim 20, wherein the one or more biomarkers comprises CXCL3.

29. The method of claim 20, wherein the one or more biomarkers comprises CXCL5.

30. The method of claim 20, wherein the one or more biomarkers comprises CXCL6.

31. The method of claim 20, wherein the one or more biomarkers comprises IL6.

32. The method of claim 20, wherein the one or more biomarkers comprises IL8.

33. The method of claim 20, wherein the one or more biomarkers comprises PTGS2.

34. The method of claim 20, wherein the one or more biomarkers comprises CCL3.

35. The method of claim 20, wherein the one or more biomarkers comprises CCL4.

36. The method of claim 20, wherein the one or more biomarkers comprises CCL8.

37. The method of claim 20, wherein the one or more biomarkers comprises CFB.

38. The method of claim 20, wherein the one or more biomarkers comprises IL1B.

39. The method of claim 20, wherein the one or more biomarkers comprises MMP3.

40. The method of claim 20, wherein the one or more biomarkers are CCL20, CCL22, CSF3(GCSF), CXCL1, CXCL2, CXCL3, CXCL5, CXCL6, IL6, IL8, and PTGS2.

41. The method of claim 40, wherein a composite score is calculated based on the levels of CCL20, CCL22, CSF3, CXCL1, CXCL2, CXCL3, CXCL5, CXCL6, IL6, IL8, and PTGS2, and wherein the method further comprises comparing the composite score to a reference score.

42. The method of claim 20, wherein the one or more biomarkers are CCL20, CCL3, CCL4, CCL8, CFB, CSF3(GCSF), CXCL1, CXCL2, CXCL3, CXCL5, IL1B, IL6, IL8, MMP3, and PTGS2.

43. The method of claim 42, wherein a composite score is calculated based on the levels of CCL20, CCL3, CCL4, CCL8, CFB, CSF3(GCSF), CXCL1, CXCL2, CXCL3, CXCL5, IL1B, IL6, IL8, MMP3, and PTGS2, and wherein the method further comprises comparing the composite score to a reference score.

44. The method of claim 20, wherein the one or more biomarkers are CCL20, CSF3(GCSF), CXCL1, CXCL2, CXCL3, CXCL5, IL6, IL8, and PTGS2.

45. The method of claim 44, wherein a composite score is calculated based on the levels of CCL20, CSF3(GCSF), CXCL1, CXCL2, CXCL3, CXCL5, IL6, IL8, and PTGS2, and wherein the method further comprises comparing the composite score to a reference score.

46. The method of any one of claims 20 to 45, wherein the levels of the one or more biomarkers are determined by measuring the nucleic acid levels of the one or more biomarkers, wherein optionally the nucleic acid is mRNA.

47. The method of any one of claims 20 to 45, wherein the levels of the one or more biomarkers are determined by measuring the protein levels of the one or more biomarkers.

48. The method of any one of claims 1 to 19, wherein the levels of the one or more biomarkers are the levels of cytokines secreted by the sample selected from a group consisting of GCSF, CXCL1, IL4, IL6, IL8, MDC, IP10, GMCSF, MIP1a and TGFa.

49. The method of any one of claims 1 to 19, wherein the levels of the one or more biomarkers are the levels of cytokines secreted by the sample selected from a group consisting of GCSF, CXCL1, IL4, IL6, IL8, MDC and IP10.

50. The method of any one of claims 1 to 19, wherein the levels of the one or more biomarkers are the levels of cytokines secreted by the sample selected from a group consisting of CXCL1, GCSF, GMCSF, IL6, IL8, MIP1a and TGFa.

51. The method of claim 48, wherein the one or more biomarkers comprises GCSF, wherein optionally the one or more biomarkers comprise GCSF, CXCL1 and IL6.

52. The method of claim 48, wherein the one or more biomarkers comprises CXCL1.

53. The method of claim 48, wherein the one or more biomarkers comprises IL4.

54. The method of claim 48, wherein the one or more biomarkers comprises IL6.

55. The method of claim 48, wherein the one or more biomarkers comprises IL8.

56. The method of claim 48, wherein the one or more biomarkers comprises MDC.

57. The method of claim 48, wherein the one or more biomarkers comprises IP10.

58. The method of claim 48, wherein the one or more biomarkers comprises GMCSF.

59. The method of claim 48, wherein the one or more biomarkers comprises MIP1a.

60. The method of claim 48, wherein the one or more biomarkers comprises TGFa.

61. The method of claim 48, wherein the one or more biomarkers are GCSF, CXCL1, IL4, IL6, IL8, MDC and IP10.

62. The method of claim 61, wherein a composite score is calculated based on the levels of GCSF, CXCL1, IL4, IL6, IL8, MDC and IP10, and wherein the method further comprises comparing the composite score to a reference score.

63. The method of claim 48, wherein the one or more biomarkers are CXCL1, GCSF, GMCSF, IL6, IL8, MIP1a and TGFa.

64. The method of claim 63, wherein a composite score is calculated based on the levels of CXCL1, GCSF, GMCSF, IL6, IL8, MIP1a and TGFa, and wherein the method further comprises comparing the composite score to a reference score.

65. The method of claim 48, wherein the one or more biomarkers are GCSF, CXCL1, IL6 and IL8.

66. The method of claim 65, wherein a composite score is calculated based on the levels of GCSF, CXCL1, IL6 and IL8, and wherein the method further comprises comparing the composite score to a reference score.

67. The method of any one of claims 48 to 66, wherein the levels of the one or more biomarkers are determined by measuring the protein levels of the one or more biomarkers.

68. A method of screening or identifying an agent that is capable of inhibiting IL1α, comprising:
i. providing a sample from a subject;
ii. contacting the sample with the agent;
iii. measuring levels of one or more biomarkers in the sample;
iv. determining if the agent is capable of inhibiting IL1α based on the levels of the one or more biomarkers as measured in step (iii).

69. The method of claim 68, wherein the sample comprises a skin cell, wherein optionally the skin cell is an injured skin cell.

70. The method of claim 68, wherein the sample is obtained by a skin biopsy procedure.

71. The method of claim 70, wherein the size of the sample is about 3.5 mm to 4.5 mm.

72. The method of any one of claims 68 to 71 further comprising culturing the sample ex vivo prior to administering the agent to the sample.

73. The method of any one of claims 68 to 71 further comprising culturing the sample ex vivo after administering the agent to the sample.

74. The method of any one of claims 68 to 71, wherein the agent is administered to the sample while culturing the sample ex vivo.

75. The method of any one of claims 68 to 74, wherein the levels of the one or more biomarkers are measured at least 4 hours, at least 5 hours, at least 10 hours, at least 15 hours, at least 20 hours, at least 21 hours, at least 22 hours, at least 23 hours, or at least 24 hours post the administration of the agent and/or post the sample is obtained from the subject.

76. The method of any one of claims 68 to 74, wherein the level of the one or more biomarkers are measured at about 24 hours post the administration of the agent or post the sample is obtained from the subject.

77. The method of any one of claims 68 to 76, further comprising comparing the levels of the one or more biomarkers with reference levels of the one or more biomarkers.

78. The method of claim 77, wherein the reference levels of the one or more biomarkers are the levels of the one or more biomarkers in a reference sample from the subject prior to administration of the agent.

79. The method of claim 77, wherein the reference levels of the one or more biomarkers are the levels of the one or more biomarkers in a reference sample from the subject without administration of the agent.

80. The method of claim 77, wherein the reference levels of the one or more biomarkers are pre-determined levels of the one or more biomarkers.

81. The method of claim 77, wherein the reference levels of the one or more biomarkers are the levels of the one or more biomarkers in a reference sample administered with a control agent.

82. The method of claim 81, wherein the control agent is a positive control agent that inhibits IL1α.

83. The method of claim 81, wherein the control agent is a negative control agent that does not inhibit IL1α.

84. The method of any one of claims 78 to 81 and 83, wherein the lower levels of the one or more biomarkers as compared with reference levels of the one or more biomarkers indicates the agent is capable of inhibiting IL1α, or wherein the agent is identified as capable of inhibiting IL1α if the levels of the one or more biomarkers in the sample are at least 20%, at least 30%, at least 35%, at least 40%, or at least 50% less than the reference levels.

85. The method of any one of claims 68 to 84, wherein the levels of the one or more biomarkers are the expression levels of one or more biomarkers selected from a group consisting of CCL20, CCL22, CSF3(GCSF), CXCL1, CXCL2, CXCL3, CXCL5, CXCL6, IL6, IL8, PTGS2, CCL3, CCL4, CCL8, CFB, IL1B, and MMP3.

86. The method of any one of claims 68 to 84, wherein the levels of the one or more biomarkers are the expression levels of one or more biomarkers selected from a group consisting of CCL20, CCL22, CSF3(GCSF), CXCL1, CXCL2, CXCL3, CXCL5, CXCL6, IL6, IL8, and PTGS2.

87. The method of any one of claims 68 to 84, wherein the levels of the one or more biomarkers are the expression levels of one or more biomarkers selected from a group consisting of CCL20, CCL3, CCL4, CCL8, CFB, CSF3(GCSF), CXCL1, CXCL2, CXCL3, CXCL5, IL1B, IL6, IL8, MMP3, and PTGS2.

88. The method of claim 85, wherein the one or more biomarkers comprises CCL20.

89. The method of claim 85, wherein the one or more biomarkers comprises CCL22.

90. The method of claim 85, wherein the one or more biomarkers comprises CSF3, wherein optionally the one or more biomarkers comprise CSF3 (GCSF), CXCL1 and IL6.

91. The method of claim 85, wherein the one or more biomarkers comprises CXCL1.

92. The method of claim 85, wherein the one or more biomarkers comprises CXCL2.

93. The method of claim 85, wherein the one or more biomarkers comprises CXCL3.

94. The method of claim 85, wherein the one or more biomarkers comprises CXCL5.

95. The method of claim 85, wherein the one or more biomarkers comprises CXCL6.

96. The method of claim 85, wherein the one or more biomarkers comprises IL6.

97. The method of claim 85, wherein the one or more biomarkers comprises IL8.

98. The method of claim 85, wherein the one or more biomarkers comprises PTGS2.

99. The method of claim 85, wherein the one or more biomarkers comprises CCL3.

100. The method of claim 85, wherein the one or more biomarkers comprises CCL4.

101. The method of claim 85, wherein the one or more biomarkers comprises CCL8.

102. The method of claim 85, wherein the one or more biomarkers comprises CFB.

103. The method of claim 85, wherein the one or more biomarkers comprises IL1B.

104. The method of claim 85, wherein the one or more biomarkers comprises MMP3.

105. The method of claim 85, wherein the one or more biomarkers are CCL20, CCL22, CSF3(GCSF), CXCL1, CXCL2, CXCL3, CXCL5, CXCL6, IL6, IL8, and PTGS2.

106. The method of claim 105, wherein a composite score is calculated based on the levels of CCL20, CCL22, CSF3, CXCL1, CXCL2, CXCL3, CXCL5, CXCL6, IL6, IL8, and PTGS2, and wherein the method further comprises comparing the composite score to a reference score.

107. The method of claim 85, wherein the one or more biomarkers are CCL20, CCL3, CCL4, CCL8, CFB, CSF3(GCSF), CXCL1, CXCL2, CXCL3, CXCL5, IL1B, IL6, IL8, MMP3, and PTGS2.

108. The method of claim 107, wherein a composite score is calculated based on the levels of CCL20, CCL3, CCL4, CCL8, CFB, CSF3(GCSF), CXCL1, CXCL2, CXCL3, CXCL5, IL1B, IL6, IL8, MMP3, and PTGS2, and wherein the method further comprises comparing the composite score to a reference score.

109. The method of claim 85, wherein the one or more biomarkers are CCL20, CSF3(GCSF), CXCL1, CXCL2, CXCL3, CXCL5, IL6, IL8, and PTGS2.

110. The method of claim 109, wherein a composite score is calculated based on the levels of CCL20, CSF3(GCSF), CXCL1, CXCL2, CXCL3, CXCL5, IL6, IL8, and PTGS2, and wherein the method further comprises comparing the composite score to a reference score.

111. The method of any one of claims 85 to 110, wherein the levels of the one or more biomarkers are determined by measuring the nucleic acid levels of the one or more biomarkers, wherein optionally the nucleic acid is mRNA.

112. The method of any one of claims 85 to 110, wherein the levels of the one or more biomarkers are determined by measuring the protein levels of the one or more biomarkers.

113. The method of any one of claims 68 to 84, wherein the levels of the one or more biomarkers are the levels of cytokines secreted by the sample selected from a group consisting of GCSF, CXCL1, IL4, IL6, IL8, MDC, IP10, GMCSF, MIP1a and TGFa.

114. The method of any one of claims 68 to 84, wherein the levels of the one or more biomarkers are the levels of cytokines secreted by the sample selected from a group consisting of GCSF, CXCL1, IL4, IL6, IL8, MDC and IP10.

115. The method of any one of claims 68 to 84, wherein the levels of the one or more biomarkers are the levels of cytokines secreted by the sample selected from a group consisting of CXCL1, GCSF, GMCSF, IL6, IL8, MIP1a and TGFa.

116. The method of claim 113, wherein the one or more biomarkers comprises GCSF, wherein optionally the one or more biomarkers comprise GCSF, CXCL1 and IL6.

117. The method of claim 113, wherein the one or more biomarkers comprises CXCL1.

118. The method of claim 113, wherein the one or more biomarkers comprises IL4.

119. The method of claim 113, wherein the one or more biomarkers comprises IL6.

120. The method of claim 113, wherein the one or more biomarkers comprises IL8.

121. The method of claim 113, wherein the one or more biomarkers comprises MDC.

122. The method of claim 113, wherein the one or more biomarkers comprises IP10.

123. The method of claim 113, wherein the one or more biomarkers comprises GMCSF.

124. The method of claim 113, wherein the one or more biomarkers comprises MIP1a.

125. The method of claim 113, wherein the one or more biomarkers comprises TGFa.

126. The method of claim 113, wherein the one or more biomarkers are GCSF, CXCL1, IL4, IL6, IL8, MDC and IP10.

127. The method of claim 126, wherein a composite score is calculated based on the levels of GCSF, CXCL1, IL4, IL6, IL8, MDC and IP10, and wherein the method further comprises comparing the composite score to a reference score.

128. The method of claim 113, wherein the one or more biomarkers are CXCL1, GCSF, GMCSF, IL6, IL8, MIP1a and TGFa.

129. The method of claim 128, wherein a composite score is calculated based on the levels of CXCL1, GCSF, GMCSF, IL6, IL8, MIP1a and TGFa, and wherein the method further comprises comparing the composite score to a reference score.

130. The method of claim 113, wherein the one or more biomarkers are GCSF, CXCL1, IL6 and IL8.

131. The method of claim 130, wherein a composite score is calculated based on the levels of GCSF, CXCL1, IL6 and IL8, and wherein the method further comprises comparing the composite score to a reference score.

132. The method of any one of claims 113 to 131, wherein the levels of the one or more biomarkers are determined by measuring the protein levels of the one or more biomarkers.

133. A method of determining a pharmacodynamics or pharmacokinetic effect of an inhibitor of IL1α comprising:
i. obtaining a first sample from a subject;
ii. administering the inhibitor of IL1α to the subject;
iii. obtaining a second sample from the subject;
iv. measuring the levels of the one or more biomarkers in the first sample and the second sample, and
v. determing that the inhibitor of IL1α is effective if the levels of the one or more biomarkers in the second sample are lower than the levels of the one or more biomarkers in the first sample.

134. A method of monitoring the response of a subject having an IL1α mediated disease to an IL1α inhibitor comprising:
i. obtaining a first sample from a subject;
ii. administering an IL1a inhibitor to the subject;
iii. obtaining a second sample from the subject;
iv. measuring levels of one or more biomarkers in the first sample and the second sample; and
v. determining that the treatment or the predefined dose is effective when the levels of the one or more biomarkers in the second sample are lower than the levels of one or more biomarkers in the first sample.

135. The method of claim 133 or 134, wherein the second sample is obtained from the subject at 1.5 to 2.5 hours post the administration of the IL1α inhibitor to the subject.

136. The method of claim 135, wherein the second sample is obtained from the subject at about 2 hours post the administration of the IL1α inhibitor to the subject.

137. The method of any one of claims 133 to 136, wherein the first sample and the second sample comprise a skin cell.

138. The method of claim 137, wherein the first sample and the second sample comprise an injured skin cell.

139. The method of any one of claims 133 to 138, wherein the first sample and the second sample are obtained by a skin biopsy procedure.

140. The method of claim 139, wherein the size of the first sample and the second sample is about 3.5 mm to 4.5 mm.

141. The method of any one of claims 133 to 140, wherein the levels of the one or more biomarkers are the expression levels of one or more biomarkers selected from a group consisting of CCL20, CCL22, CSF3(GCSF), CXCL1, CXCL2, CXCL3, CXCLS, CXCL6, IL6, IL8, PTGS2, CCL3, CCL4, CCL8, CFB, IL1B, and MMP3.

142. The method of any one of claims 133 to 140, wherein the levels of the one or more biomarkers are the expression levels of one or more biomarkers selected from a group consisting of CCL20, CCL22, CSF3(GCSF), CXCL1, CXCL2, CXCL3, CXCLS, CXCL6, IL6, IL8, and PTGS2.

143. The method of any one of claims 133 to 140, wherein the levels of the one or more biomarkers are the expression levels of one or more biomarkers selected from a group consisting of CCL20, CCL3, CCL4, CCL8, CFB, CSF3(GCSF), CXCL1, CXCL2, CXCL3, CXCL5, IL1B, IL6, IL8, MMP3, and PTGS2.

144. The method of claim 141, wherein the one or more biomarkers comprises CCL20.

145. The method of claim 141, wherein the one or more biomarkers comprises CCL22.

146. The method of claim 141, wherein the one or more biomarkers comprises CSF3, wherein optionally the one or more biomarkers comprise CSF3 (GCSF), CXCL1 and IL6.

147. The method of claim 141, wherein the one or more biomarkers comprises CXCL1.

148. The method of claim 141, wherein the one or more biomarkers comprises CXCL2.

149. The method of claim 141, wherein the one or more biomarkers comprises CXCL3.

150. The method of claim 141, wherein the one or more biomarkers comprises CXCL5.

151. The method of claim 141, wherein the one or more biomarkers comprises CXCL6.

152. The method of claim 141, wherein the one or more biomarkers comprises IL6.

153. The method of claim 141, wherein the one or more biomarkers comprises IL8.

154. The method of claim 141, wherein the one or more biomarkers comprises PTGS2.

155. The method of claim 141, wherein the one or more biomarkers comprises CCL3.

156. The method of claim 141, wherein the one or more biomarkers comprises CCL4.

157. The method of claim 141, wherein the one or more biomarkers comprises CCL8.

158. The method of claim 141, wherein the one or more biomarkers comprises CFB.

159. The method of claim 141, wherein the one or more biomarkers comprises IL1B.

160. The method of claim 141, wherein the one or more biomarkers comprises MMP3.

161. The method of claim 141, wherein the one or more biomarkers are CCL20, CCL22, CSF3(GCSF), CXCL1, CXCL2, CXCL3, CXCL5, CXCL6, IL6, IL8, and PTGS2.

162. The method of claim 160, wherein a composite score is calculated based on the levels of CCL20, CCL22, CSF3, CXCL1, CXCL2, CXCL3, CXCL5, CXCL6, IL6, IL8, and PTGS2, and wherein the method further comprises comparing the composite score to a reference score.

163. The method of claim 141, wherein the one or more biomarkers are CCL20, CCL3, CCL4, CCL8, CFB, CSF3(GCSF), CXCL1, CXCL2, CXCL3, CXCL5, IL1B, IL6, IL8, MMP3, and PTGS2.

164. The method of claim 163, wherein a composite score is calculated based on the levels of CCL20, CCL3, CCL4, CCL8, CFB, CSF3(GCSF), CXCL1, CXCL2, CXCL3, CXCL5, IL1B, IL6, IL8, MMP3, and PTGS2, and wherein the method further comprises comparing the composite score to a reference score.

165. The method of claim 141, wherein the one or more biomarkers are CCL20, CSF3(GCSF), CXCL1, CXCL2, CXCL3, CXCL5, IL6, IL8, and PTGS2.

166. The method of claim 165, wherein a composite score is calculated based on the levels of CCL20, CSF3(GCSF), CXCL1, CXCL2, CXCL3, CXCL5, IL6, IL8, and PTGS2, and wherein the method further comprises comparing the composite score to a reference score.

167. The method of any one of claims 141 to 166, wherein the levels of the one or more biomarkers are determined by measuring the nucleic acid levels of the one or more biomarkers, wherein optionally the nucleic acid is mRNA.

168. The method of any one of claims 141 to 166, wherein the levels of the one or more biomarkers are determined by measuring the protein levels of the one or more biomarkers.

169. The method of any one of claims 133 to 140, wherein the levels of the one or more biomarkers are the levels of cytokines secreted by the sample selected from a group consisting of GCSF, CXCL1, IL4, IL6, IL8, MDC, IP10, GMCSF, MIP1a and TGFa.

170. The method of any one of claims 133 to 140, wherein the levels of the one or more biomarkers are the levels of cytokines secreted by the sample selected from a group consisting of GCSF, CXCL1, IL4, IL6, IL8, MDC and IP10.

171. The method of any one of claims 133 to 140, wherein the levels of the one or more biomarkers are the levels of cytokines secreted by the sample selected from a group consisting of CXCL1, GCSF, GMCSF, IL6, IL8, MIP1a and TGFa.

172. The method of claim 171, wherein the one or more biomarkers comprises GCSF, wherein optionally the one or more biomarkers comprise GCSF, CXCL1 and IL6.

173. The method of claim 171, wherein the one or more biomarkers comprises CXCL1.

174. The method of claim 171, wherein the one or more biomarkers comprises IL4.

175. The method of claim 171, wherein the one or more biomarkers comprises IL6.

176. The method of claim 171, wherein the one or more biomarkers comprises IL8.

177. The method of claim 171, wherein the one or more biomarkers comprises MDC.

178. The method of claim 171, wherein the one or more biomarkers comprises IP10.

179. The method of claim 171, wherein the one or more biomarkers comprises GMCSF.

180. The method of claim 171, wherein the one or more biomarkers comprises MIP1a.

181. The method of claim 171, wherein the one or more biomarkers comprises TGFa.

182. The method of claim 171, wherein the one or more biomarkers are GCSF, CXCL1, IL4, IL6, IL8, MDC and IP10.

183. The method of claim 182, wherein a composite score is calculated based on the levels of GCSF, CXCL1, IL4, IL6, IL8, MDC and IP10, and wherein the method further comprises comparing the composite score to a reference score.

184. The method of claim 171, wherein the one or more biomarkers are CXCL1, GCSF, GMCSF, IL6, IL8, MIP1a and TGFa.

185. The method of claim 184, wherein a composite score is calculated based on the levels of CXCL1, GCSF, GMCSF, IL6, IL8, MIP1a and TGFa, and wherein the method further comprises comparing the composite score to a reference score.

186. The method of claim 171, wherein the one or more biomarkers are GCSF, CXCL1, IL6 and IL8.

187. The method of claim 186, wherein a composite score is calculated based on the levels of GCSF, CXCL1, IL6 and IL8, and wherein the method further comprises comparing the composite score to a reference score.

188. The method of any one of claims 169 to 187, wherein the levels of the one or more biomarkers are determined by measuring the protein levels of the one or more biomarkers.

189. The method of any one of claim 1-19, 68-84 or 133-140, wherein the levels of the one or more biomarkers are the expression levels of one or more biomarkers selected from a group consisting of GCSF (CSF3), CXCL1, IL6, GMCSF (CSF2), CCL20, CCL22, CXCL2, CXCL3, CXCLS, IL1B, PTGS2, CCL3, CCL4, CCL8, CFB, MMP3, FDCSP, PTX3, CCL3L3, CXCL8, FGF2, NEFM, TNIP3, MMP10, ADORA2A, DEFB4A, GPR84, AC243829.4, COLQ, TFPI2, SPRR2A, OXTR, CCL4L2, MMP1, TNFAIP6, HMX3, LIF, CD274, AC073862.2, TNFRSF11B, AC003092.1, SALL1, AC084871.4, CD38, NFKBIZ, ZC3H12A, SLC4A4, AL139393.3, MSC, SLC1A2, CCL2, GOS2, SLC34A2, AC073611.1, AC106865.1, AL078604.2, INHBA, LCN2, AC009303.4, TDO2, NGF, IER3, BCL2A1, SOD2, CEMIP, SAA1, TRAF1, GCH1, AC007780.1, AC007998.3, TMC1, GRM1, SPINK6, CD1D, IL17C, AC004264.1, EDNRB, DRAM1, CH25H, FOXD4L1, PTGES, SAA2, SLC39A14, RIPK2, PANX2, HS3ST3B1, IL23A, ROR1-AS1, AP002784.1, TMEM132A, ADAMTSS, OSM, RGS3, BMP6, STC1, SIRPA, RFX8, TMEM158, PAX1, IL24, ODAM, BCAT1, AC099494.2, ZNF697, C2CD4A, CCRL2, LAMA1, LSS, TGFB3, TM4SF1, CCL7, FFAR3, QPCTL, GRAMD1A, DNAJB5, ARSG, NRP2, INSM1, ICAM1, REP15, ACSL4, AC073862.5, LYN, AKR1C1, SDK1, THBS2, IL4I1, PILRA, SLC39A8, NEU4, MT1A, NRIP3, C2CD4B, ASPHD1, SLC11A1, SPRR2B, NFKB2, TNFRSF9, and NKX3-1.

190. The method of claim 189, wherein the biomarkers are GCSF (CSF3), CXCL1, IL6, GMCSF (CSF2), CCL20, CCL22, CXCL2, CXCL3, CXCL5, IL1B, PTGS2, CCL3, CCL4, CCL8, CFB, MMP3, FDCSP, PTX3, CCL3L3, CXCL8, FGF2, NEFM, TNIP3, MMP10, ADORA2A, DEFB4A, GPR84, AC243829.4, COLQ, TFPI2, SPRR2A, OXTR, CCL4L2, MMP1, TNFAIP6, HMX3, LIF, CD274, AC073862.2, TNFRSF11B, AC003092.1, SALL1, AC084871.4, CD38, NFKBIZ, ZC3H12A, SLC4A4, AL139393.3, MSC, SLC1A2, CCL2, GOS2, SLC34A2, AC073611.1, AC106865.1, AL078604.2, INHBA, LCN2, AC009303.4, TDO2, NGF, IER3, BCL2A1, SOD2, CEMIP, SAA1, TRAF1, GCH1, AC007780.1, AC007998.3, TMC1, GRM1, SPINK6, CD1D, IL17C, AC004264.1, EDNRB, DRAM1, CH25H, FOXD4L1, PTGES, SAA2, SLC39A14, RIPK2, PANX2, HS3ST3B1, IL23A, ROR1-AS1, AP002784.1, TMEM132A, ADAMTS5, OSM, RGS3, BMP6, STC1, SIRPA, RFX8, TMEM158, PAX1, IL24, ODAM, BCAT1, AC099494.2, ZNF697, C2CD4A, CCRL2, LAMA1, LSS, TGFB3, TM4SF1, CCL7, FFAR3, QPCTL, GRAMD1A, DNAJB5, ARSG, NRP2, INSM1, ICAM1, REP15, ACSL4, AC073862.5, LYN, AKR1C1, SDK1, THBS2, IL4I1, PILRA, SLC39A8, NEU4, MT1A, NRIP3, C2CD4B, ASPHD1, SLC11A1, SPRR2B, NFKB2, TNFRSF9, and NKX3-1.

191. The method of any one of claim 1-19, 68-84 or 133-140, wherein the levels of the one or more biomarkers are the expression levels of one or more biomarkers selected from a group consisting of GCSF (CSF3), CXCL1, IL6, IL8, IL4, MDC, IP10, GMCSF (CSF2), MIP1a, TGFa, CCL20, CCL22, CXCL2, CXCL3, CXCL5, CXCL6, IL1B, PTGS2, CCL3, CCL4, CCL8, CFB, MMP3, FDCSP, PTX3, CCL3L3, CXCL8, FGF2, NEFM, TNIP3, MMP10, ADORA2A, DEFB4A, GPR84, AC243829.4, COLQ, TFPI2, SPRR2A, OXTR, CCL4L2, MMP1, TNFAIP6, HMX3, LIF, CD274, AC073862.2, TNFRSF11B, AC003092.1, SALL1, AC084871.4, CD38, NFKBIZ, ZC3H12A, SLC4A4, AL139393.3, MSC, SLC1A2, CCL2, GOS2, SLC34A2, AC073611.1, AC106865.1, AL078604.2, INHBA, LCN2, AC009303.4, TDO2, NGF, IER3, BCL2A1, SOD2, CEMIP, SAA1, TRAF1, GCH1, AC007780.1, AC007998.3, TMC1, GRM1, SPINK6, CD1D, IL17C, AC004264.1, EDNRB, DRAM1, CH25H, FOXD4L1, PTGES, SAA2, SLC39A14, RIPK2, PANX2, HS3ST3B1, IL23A, ROR1-AS1, AP002784.1, TMEM132A, ADAMTS5, OSM, RGS3, BMP6, STC1, SIRPA, RFX8, TMEM158, PAX1, IL24, ODAM, BCAT1, AC099494.2, ZNF697, C2CD4A, CCRL2, LAMA1, LSS, TGFB3, TM4SF1, CCL7, FFAR3, QPCTL, GRAMD1A, DNAJB5, ARSG, NRP2, INSM1, ICAM1, REP15, ACSL4, AC073862.5, LYN, AKR1C1, SDK1, THBS2, IL4I1, PILRA, SLC39A8, NEU4, MT1A, NRIP3, C2CD4B, ASPHD1, SLC11A1, SPRR2B, NFKB2, TNFRSF9, and NKX3-1.

192. The method of claim 191, wherein the biomarkers are GCSF (CSF3), CXCL1, IL6, IL8, IL4, MDC, IP10, GMCSF (CSF2), MIP1a, TGFa, CCL20, CCL22, CXCL2, CXCL3, CXCL5, CXCL6, IL1B, PTGS2, CCL3, CCL4, CCL8, CFB, MMP3, FDCSP, PTX3, CCL3L3, CXCL8, FGF2, NEFM, TNIP3, MMP10, ADORA2A, DEFB4A, GPR84, AC243829.4, COLQ, TFPI2, SPRR2A, OXTR, CCL4L2, MMP1, TNFAIP6, HMX3, LIF, CD274, AC073862.2, TNFRSF11B, AC003092.1, SALL1, AC084871.4, CD38, NFKBIZ, ZC3H12A, SLC4A4, AL139393.3, MSC, SLC1A2, CCL2, GOS2, SLC34A2, AC073611.1, AC106865.1, AL078604.2, INHBA, LCN2, AC009303.4, TDO2, NGF, IER3, BCL2A1, SOD2, CEMIP, SAA1, TRAF1, GCH1, AC007780.1, AC007998.3, TMC1, GRM1, SPINK6, CD1D, IL17C, AC004264.1, EDNRB, DRAM1, CH25H, FOXD4L1, PTGES, SAA2, SLC39A14, RIPK2, PANX2, HS3ST3B1, IL23A, ROR1-AS1, AP002784.1, TMEM132A, ADAMTS5, OSM, RGS3, BMP6, STC1, SIRPA, RFX8, TMEM158, PAX1, IL24, ODAM, BCAT1, AC099494.2, ZNF697, C2CD4A, CCRL2, LAMA1, LSS, TGFB3, TM4SF1, CCL7, FFAR3, QPCTL, GRAMD1A, DNAJB5, ARSG, NRP2, INSM1, ICAM1, REP15, ACSL4, AC073862.5, LYN, AKR1C1, SDK1, THBS2, IL4I1, PILRA, SLC39A8, NEU4, MT1A, NRIP3, C2CD4B, ASPHD1, SLC11A1, SPRR2B, NFKB2, TNFRSF9, and NKX3-1.

193. The method of any one of claims 134-192, wherein the IL1α mediated disease is atopic dermatitis.

194. The method of any one of claims 134-192, wherein the IL1α mediated disease is hidradenitis suppurativa.

195. The method of any one of claim 1-67 or 133-188, wherein the inhibitor of IL1α is an anti-IL1α antibody.

196. The method of claim 195, wherein the anti-IL1α antibody is bermekimab.

197. A kit for determining or monitoring a pharmacodynamics or pharmacokinetic effect of an inhibitor of IL1α comprising:
(a) an agent for measuring levels of one or more biomarkers in a sample, wherein the one or more biomarkers are selected from (i) a group consisting of CCL20, CCL22, CSF3(GCSF), CXCL1, CXCL2, CXCL3, CXCL5, CXCL6, IL6, IL8, PTGS2, CCL3, CCL4, CCL8, CFB, IL1B, and MMP3, or (ii) a group consisting of GCSF, CXCL1, IL4, IL6, IL8, MDC, IP10, GMCSF, MIP1a and TGFa; and
(b) a positive control agent that inhibits IL1α and/or a negative control agent that does not inhibit IL1α.

198. The kit of claim 197, wherein the positive control agent is an antibody that binds to IL1α.

199. The kit of claim 197 or 198, wherein the kit further comprises a tool for obtaining the sample from a subject.

200. The kit of claim 199, wherein the tool is suitable for obtaining a skin sample from the subject.

201. The kit of any one of claims 197 to 200, wherein the kit further comprises a tool for administering the inhibitor of IL1α to the sample.

202. The method or kit of any one of claims 1 to 201, wherein the subject has atopic dermatitis, hidradenitis suppurativa, psoriasis, cutaneous lupus erythematosus, or autoimmune bullous disease.

203. The method or kit of claim 202, wherein the subject has atopic dermatitis.

204. The method or kit of claim 202, wherein the subject has hidradenitis suppurativa.

The application's sequence listing, which the Patent Office published only in electronic form, follows.

SEQUENCE LISTING (159 sequences)

SEQ ID NO: 1 - DNA, 799 bp, Homo sapiens
cactcccaaagaactgggtactcaacactgagcagatctgttctttgagctaaaaaccatgtgctgtaccaagagtttgctcctggctgctttgatgtcagtgctgctactccacctctgcggcgaatcagaagcagcaagcaactttgactgctgtcttggatacacagaccgtattcttcatcctaaatttattgtgggcttcacacggcagctggccaatgaaggctgtgacatcaatgctatcatctttcacacaaagaaaaagttgtctgtgtgcgcaaatccaaaacagacttgggtgaaatatattgtgcgtctcctcagtaaaaaagtcaagaacatgtaaaaactgtggcttttctggaatggaattggacatagcccaagaacagaaagaaccttgctggggttggaggtttcacttgcacatcatggagggtttagtgcttatctaatttgtgcctcactggacttgtccaattaatgaagttgattcatattgcatcatagtttgctttgtttaagcatcacattaaagttaaactgtattttatgttatttatagctgtaggttttctgtgtttagctatttaatactaattttccataagctattttggtttagtgcaaagtataaaattatatttgggggggaataagattatatggactttcttgcaagcaacaagctattttttaaaaaaactatttaacattcttttgtttatattgttttgtctcctaaattgttgtaattgcattataaaataagaaaaacattaataagacaaatatt

SEQ ID NO: 2 - DNA, 2918 bp, Homo sapiens
caggacagagcatggatcgcctacagactgcactcctggttgtcctcgtcctccttgctgtggcgcttcaagcaactgaggcaggcccctacggcgccaacatggaagacagcgtctgctgccgtgattacgtccgttaccgtctgcccctgcgcgtggtgaaacacttctactggacctcagactcctgcccgaggcctggcgtggtgttgctaaccttcagggataaggagatctgtgccgatcccagagtgccctgggtgaagatgattctcaataagctgagccaatgaagagcctactctgatgaccgtggccttggctcctccaggaaggctcaggagccctacctccctgccattatagctgctccccgccagaagcctgtgccaactctctgcattccctgatctccatccctgtggctgtcacccttggtcacctccgtgctgtcactgccatctcccccctgacccctctaacccatcctctgcctccctccctgcagtcagagggtcctgttcccatcagcgattcccctgcttaaacccttccatgactccccactgccctaagctgaggtcagtctcccaagcctggcatgtggccctctggatctgggttccatctctgtctccagcctgcccacttcccttcatgaatgttgggttctagctccctgttctccaaacccatactacacatcccacttctgggtctttgcctgggatgttgctgacacccagaaagtcccaccacctgcacatgtgtagccccaccagccctccaaggcattgctcgcccaagcagctggtaattccatttcatgtattagatgtcccctggccctctgtcccctcttaataaccctagtcacagtctccgcagattcttgggatttgggggttttctcccccacctctccactagttggaccaaggtttctagctaagttactctagtctccaagcctctagcatagagcactgcagacaggccctggctcagaatcagagcccagaaagtggctgcagacaaaatcaataaaactaatgtccctcccctctccctgccaaaaggcagttacatatcaatacagagactcaaggtcactagaaatgggccagctgggtcaatgtgaagccccaaatttgcccagattcacctttcttcccccactccctttttttttttttttttgagatggagtttcgctcttgtcacccacgctggagtgcaatggtgtggtcttggcttattgaagcctctgcctcctgggttcaagtgattctcttgcctcagcctcctgagtagctgggattacaggttcctgctaccacgcccagctaatttttgtatttttagtagagacgaggcttcaccatgttggccaggctggtctcgaactcctgtcctcaggtaatccgcccacctcagcctcccaaagtgctgggattacaggcgtgagccacagtgcctggcctcttccctctccccaccccccccccaacttttttttttttttatggcagggtctcactctgtcgcccaggctggagtgcagtggcgtgatctcggctcactacaacctcgacctcctgggttcaagcgattctcccaccccagcctcccaagtagctgggattacaggtgtgtgccactacggctggctaatttttgtatttttagtagagacaggtttcaccatattggccaggctggtcttgaactcctgacctcaagtgatccaccttccttgtgctcccaaagtgctgagattacaggcgtgagctatcacacccagcctccccctttttttcctaataggagactcctgtacctttcttcgttttacctatgtgtcgtgtctgcttacatttccttctcccctcaggctttttttgggtggtcctccaacctccaatacccaggcctggcctcttcagagtaccccccattccactttccctgcctccttccttaaatagctgacaatcaaattcatgctatggtgtgaaagactacctttgacttggtattataagctggagttatatatgtatttgaaaacagagtaaatacttaagaggccaaatagatgaatggaagaattttaggaactgtgagagggggacaaggtggagctttcctggccctgggaggaagctggctgtggtagcgtagcgctctctctctctgtctgtggcaggaggcaaagagtagggtgtaattgagtgaaggaatcctgggtagagaccattctcaggtggttgggccaggctaaagactgggatttgggtctatctatgcctttctggctgatttttgtagagacggggttttgccatgttacccaggctggtctcaaactcctgggctcaagcgatcctcctggctcagcctcccaaagtgctgggattacaggcgtgagtcactgcgcctggcttcctcttcctcttgagaaatattcttttcatacagcaagtatgggacagcagtgtcccaggtaaaggacataaatgttacaagtgtctggtcctttctgagggaggctggtgccgctctgcagggtatttgaacctgtggaattggaggaggccatttcactccctgaacccagcctgacaaatcacagtgagaatgttcaccttataggcttgctgtggggctcaggttgaaagtgtggggagtgacactgcctaggcatccagctcagtgtcatccagggcctgtgtccctcccgaacccagggtcaacctgcctaccacaggcactagaaggacgaatctgcctactgcccatgaacggggccctcaagcgtcctgggatctccttctccctcctgtcctgtccttgcccctcaggactgctggaaaataaatcctttaaaatagaaaaaaaaaaaaaaaaaaaaaaaa

SEQ ID NO: 3 - DNA, 1518 bp, Homo sapiens
aaaacagcccggagcctgcagcccagccccacccagacccatggctggacctgccacccagagccccatgaagctgatggccctgcagctgctgctgtggcacagtgcactctggacagtgcaggaagccacccccctgggccctgccagctccctgccccagagcttcctgctcaagtgcttagagcaagtgaggaagatccagggcgatggcgcagcgctccaggagaagctggtgagtgagtgtgccacctacaagctgtgccaccccgaggagctggtgctgctcggacactctctgggcatcccctgggctcccctgagcagctgccccagccaggccctgcagctggcaggctgcttgagccaactccatagcggccttttcctctaccaggggctcctgcaggccctggaagggatctcccccgagttgggtcccaccttggacacactgcagctggacgtcgccgactttgccaccaccatctggcagcagatggaagaactgggaatggcccctgccctgcagcccacccagggtgccatgccggccttcgcctctgctttccagcgccgggcaggaggggtcctggttgcctcccatctgcagagcttcctggaggtgtcgtaccgcgttctacgccaccttgcccagccctgagccaagccctccccatcccatgtatttatctctatttaatatttatgtctatttaagcctcatatttaaagacagggaagagcagaacggagccccaggcctctgtgtccttccctgcatttctgagtttcattctcctgcctgtagcagtgagaaaaagctcctgtcctcccatcccctggactgggaggtagataggtaaataccaagtatttattactatgactgctccccagccctggctctgcaatgggcactgggatgagccgctgtgagcccctggtcctgagggtccccacctgggacccttgagagtatcaggtctcccacgtgggagacaagaaatccctgtttaatatttaaacagcagtgttccccatctgggtccttgcacccctcactctggcctcagccgactgcacagcggcccctgcatccccttggctgtgaggcccctggacaagcagaggtggccagagctgggaggcatggccctggggtcccacgaatttgctggggaatctcgtttttcttcttaagacttttgggacatggtttgactcccgaacatcaccgacgtgtctcctgtttttctgggtggcctcgggacacctgccctgcccccacgagggtcaggactgtgactctttttagggccaggcaggtgcctggacatttgccttgctggacggggactggggatgtgggagggagcagacaggaggaatcatgtcaggcctgtgtgtgaaaggaagctccactgtcaccctccacctcttcaccccccactcaccagtgtcccctccactgtcacattgtaactgaacttcaggataataaagtgtttgcctcca

SEQ ID NO: 4 - DNA, 1103 bp, Homo sapiens
cacagagcccgggccgcaggcacctcctcgccagctcttccgctcctctcacagccgccagacccgcctgctgagccccatggcccgcgctgctctctccgccgcccccagcaatccccggctcctgcgagtggcactgctgctcctgctcctggtagccgctggccggcgcgcagcaggagcgtccgtggccactgaactgcgctgccagtgcttgcagaccctgcagggaattcaccccaagaacatccaaagtgtgaacgtgaagtcccccggaccccactgcgcccaaaccgaagtcatagccacactcaagaatgggcggaaagcttgcctcaatcctgcatcccccatagttaagaaaatcatcgaaaagatgctgaacagtgacaaatccaactgaccagaagggaggaggaagctcactggtggctgttcctgaaggaggccctgcccttataggaacagaagaggaaagagagacacagctgcagaggccacctggattgtgcctaatgtgtttgagcatcgcttaggagaagtcttctatttatttatttattcattagttttgaagattctatgttaatattttaggtgtaaaataattaagggtatgattaactctacctgcacactgtcctattatattcattctttttgaaatgtcaaccccaagttagttcaatctggattcatatttaatttgaaggtagaatgttttcaaatgttctccagtcattatgttaatatttctgaggagcctgcaacatgccagccactgtgatagaggctggcggatccaagcaaatggccaatgagatcattgtgaaggcaggggaatgtatgtgcacatctgttttgtaactgtttagatgaatgtcagttgttatttattgaaatgatttcacagtgtgtggtcaacatttctcatgttgaaactttaagaactaaaatgttctaaatatcccttggacattttatgtctttcttgtaaggcatactgccttgtttaatggtagttttacagtgtttctggcttagaacaaaggggcttaattattgatgttttcatagagaatataaaaataaagcacttatag

SEQ ID NO: 5 - DNA, 1234 bp, Homo sapiens
gagctccgggaatttccctggcccgggactccgggctttccagccccaaccatgcataaaaggggttcgccgttctcggagagccacagagcccgggccacaggcagctccttgccagctctcctcctcgcacagccgctcgaaccgcctgctgagccccatggcccgcgccacgctctccgccgcccccagcaatccccggctcctgcgggtggcgctgctgctcctgctcctggtggccgccagccggcgcgcagcaggagcgcccctggccactgaactgcgctgccagtgcttgcagaccctgcagggaattcacctcaagaacatccaaagtgtgaaggtgaagtcccccggaccccactgcgcccaaaccgaagtcatagccacactcaagaatgggcagaaagcttgtctcaaccccgcatcgcccatggttaagaaaatcatcgaaaagatgctgaaaaatggcaaatccaactgaccagaaggaaggaggaagcttattggtggctgttcctgaaggaggccctgcccttacaggaacagaagaggaaagagagacacagctgcagaggccacctggattgcgcctaatgtgtttgagcatcacttaggagaagtcttctatttatttatttatttatttatttgtttgttttagaagattctatgttaatattttatgtgtaaaataaggttatgattgaatctacttgcacactctcccattatatttattgtttattttaggtcaaacccaagttagttcaatcctgattcatatttaatttgaagatagaaggtttgcagatattctctagtcatttgttaatatttcttcgtgatgacatatcacatgtcagccactgtgatagaggctgaggaatccaagaaaatggccagtgagatcaatgtgacggcagggaaatgtatgtgtgtctattttgtaactgtaaagatgaatgtcagttgttatttattgaaatgatttcacagtgtgtggtcaacatttctcatgttgaagctttaagaactaaaatgttctaaatatcccttggacattttatgtctttcttgtaaggcatactgccttgtttaatgttaattatgcagtgtttccctctgtgttagagcagagaggtttcgatatttattgatgttttcacaaagaacaggaaaataaaatatttaaaaatataaaaaaaaaaaaaaaaaaaaaaaaaaaaaaaaa

SEQ ID NO: 6 - DNA, 1166 bp, Homo sapiens
gctccgggaatttccctggcccggccgctccgggctttccagtctcaaccatgcataaaaagggttcgccgatcttggggagccacacagcccgggtcgcaggcacctccccgccagctctcccgcttctcgcacagcttcccgacgcgtctgctgagccccatggcccacgccacgctctccgccgcccccagcaatccccggctcctgcgggtggcgctgctgctcctgctcctggtggccgccagccggcgcgcagcaggagcgtccgtggtcactgaactgcgctgccagtgcttgcagacactgcagggaattcacctcaagaacatccaaagtgtgaatgtaaggtcccccggaccccactgcgcccaaaccgaagtcatagccacactcaagaatgggaagaaagcttgtctcaaccccgcatcccccatggttcagaaaatcatcgaaaagatactgaacaaggggagcaccaactgacaggagagaagtaagaagcttatcagcgtatcattgacacttcctgcagggtggtccctgcccttaccagagctgaaaatgaaaaagagaacagcagctttctagggacagctggaaaggacttaatgtgtttgactatttcttacgagggttctacttatttatgtatttatttttgaaagcttgtattttaatattttacatgctgttatttaaagatgtgagtgtgtttcatcaaacatagctcagtcctgattatttaattggaatatgatgggttttaaatgtgtcattaaactaatatttagtgggagaccataatgtgtcagccaccttgataaatgacagggtggggaactggagggtggggggattgaaatgcaagcaattagtggatcactgttagggtaagggaatgtatgtacacatctattttttatactttttttttaaaaaaagaatgtcagttgttatttattcaaattatctcacattatgtgttcaacatttttatgctgaagtttcccttagacattttatgtcttgcttgtagggcataatgccttgtttaatgtccattctgcagcgtttctctttcccttggaaaagagaatttatcattactgttacatttgtacaaatgacatgataataaaagttttatgaaaaaaaaaaaaaaa

SEQ ID NO: 7 - DNA, 2475 bp, Homo sapiens
gtgcagaaggcacgaggaagccacagtgctccggatcctccaatcttcgctcctccaatctccgctcctccacccagttcaggaacccgcgaccgctcgcagcgctctcttgaccactatgagcctcctgtccagccgcgcggcccgtgtccccggtccttcgagctccttgtgcgcgctgttggtgctgctgctgctgctgacgcagccagggcccatcgccagcgctggtcctgccgctgctgtgttgagagagctgcgttgcgtttgtttacagaccacgcaaggagttcatcccaaaatgatcagtaatctgcaagtgttcgccataggcccacagtgctccaaggtggaagtggtagcctccctgaagaacgggaaggaaatttgtcttgatccagaagccccttttctaaagaaagtcatccagaaaattttggacggtggaaacaaggaaaactgattaagagaaatgagcacgcatggaaaagtttcccagtcttcagcagagaagttttctggaggtctctgaacccagggaagacaagaaggaaagattttgttgttgtttgtttatttgtttttccagtagttagctttcttcctggattcctcactttgaagagtgtgaggaaaacctatgtttgccgcttaagctttcagctcagctaatgaagtgtttagcatagtacctctgctatttgctgttattttatctgctatgctattgaagttttggcaattgactatagtgtgagccaggaatcactggctgttaatctttcaaagtgtcttgaattgtaggtgactattatatttccaagaaatattccttaagatattaactgagaaggctgtggatttaatgtggaaatgatgtttcataagaattctgttgatggaaatacactgttatcttcacttttataagaaataggaaatattttaatgtttcttggggaatatgttagagaatttccttactcttgattgtgggatactatttaattatttcactttagaaagctgagtgtttcacaccttatctatgtagaatatatttccttattcagaatttctaaaagtttaagttctatgagggctaatatcttatcttcctataattttagacattctttatctttttagtatggcaaactgccatcatttacttttaaactttgattttatatgctatttattaagtattttattaggagtaccataattctggtagctaaatatatattttagatagatgaagaagctagaaaacaggcaaattcctgactgctagtttatatagaaatgtattcttttagtttttaaagtaaaggcaaacttaacaatgacttgtactctgaaagttttggaaacgtattcaaacaatttgaatataaatttatcatttagttataaaaatatatagcgacatcctcgaggccctagcatttctccttggataggggaccagagagagcttggaatgttaaaaacaaaacaaaacaaaaaaaaacaaggagaagttgtccaagggatgtcaattttttatccctctgtatgggttagattttccaaaatcataatttgaagaaggccagcatttatggtagaatatataattatatataaggtggccacgctggggcaagttccctccccactcacagctttggcccctttcacagagtagaacctgggttagaggattgcagaagacgagcggcagcggggagggcagggaagatgcctgtcgggtttttagcacagttcatttcactgggattttgaagcatttctgtctgaatgtaaagcctgttctagtcctggtgggacacactggggttgggggtgggggaagatgcggtaatgaaaccggttagtcagtgttgtcttaatatccttgataatgctgtaaagtttatttttacaaatatttctgtttaagctatttcacctttgtttggaaatccttcccttttaaagagaaaatgtgacacttgtgaaaaggcttgtaggaaagctcctccctttttttctttaaacctttaaatgacaaacctaggtaattaatggttgtgaatttctatttttgctttgtttttaatgaacatttgtctttcagaataggattctgtgataatatttaaatggcaaaaacaaaacataattttgtgcaattaacaaagctactgcaagaaaaataaaacatttcttggtaaaaacgtatgtatttatatattatatatttatatataatatatattatatatttagcattgctgagctttttagatgcctattgtgtatcttttaaaggttttgaccattttgttatgagtaattacatatatattacattcactatattaaaattgtacttttttactatgtgtctcattggttcatagtctttattttgtcctttgaataaacattaaaagatttctaaacttcaaaaaaaaaaaaaaaaaa

SEQ ID NO: 8 - DNA, 1677 bp, Homo sapiens
accccttctttccacactgccccctgagttcagggaatttccccagcatcccaaagcttgagtttcctgccagtcgggagggatgaatgcagataaagggagtgcagaaggcacgaggaaaccaaagtgctctgtatcctccagtctccgcgcctccacccagctcaggaacccgcgaaccctctcttgaccactatgagcctcccgtccagccgcgcggcccgtgtcccgggtccttcgggctccttgtgcgcgctgctcgcgctgctgctcctgctgacgccgccggggcccctcgccagcgctggtcctgtctctgctgtgctgacagagctgcgttgcacttgtttacgcgttacgctgagagtaaaccccaaaacgattggtaaactgcaggtgttccccgcaggcccgcagtgctccaaggtggaagtggtagcctccctgaagaacgggaagcaagtttgtctggacccggaagccccttttctaaagaaagtcatccagaaaattttggacagtggaaacaagaaaaactgagtaacaaaaaagaccatgcatcataaaattgcccagtcttcagcggagcagttttctggagatccctggacccagtaagaataagaaggaagggttggtttttttccattttctacatggattccctactttgaagagtgtgggggaaagcctacgcttctccctgaagtttacagctcagctaatgaagtactaatatagtatttccactatttactgttattttacctgataagttattgaaccctttggcaattgaccatattgtgagcaaagaatcactggttattagtctttcaatgaatattgaattgaagataactattgtatttctatcatacattccttaaagtcttaccgaaaaggctgtggatttcgtatggaaataatgttttattagtgtgctgttgagggaggtatcctgttgttcttactcactcttctcataaaataggaaatattttagttctgtttcttggggaatatgttactctttaccctaggatgctatttaagttgtactgtattagaacactgggtgtgtcataccgttatctgtgcagaatatatttccttattcagaatttctaaaaatttaagttctgtaagggctaatatattctcttcctatggttttagacgtttgatgtcttcttagtatggcataatgtcatgatttactcattaaactttgattttgtatgctattttttcactataggatgactataattctggtcactaaatatacactttagatagatgaagaagcccaaaaacagataaattcctgattgctaatttacatagaaatgtattctcttggttttttaaataaaagcaaaattaacaatgatctgtgctctgaaagttttgaaaatatatttgaacaatttgaatataaattcatcatttagtcctcaaaatatatatagcattgctaagattttcagatatctattgtggatcttttaaaggttttgaccattttgttatgaggaattatacatgtatcacattcactatattaaaattgcacttttattttttcctgtgtgtcatgttggtttttggtacttgtattgtcatttggagaaacaataaaagatttctaaaccaaaaaaaaaaaaaaaaaaa

SEQ ID NO: 9 - DNA, 1125 bp, Homo sapiens
ttctgccctcgagcccaccgggaacgaaagagaagctctatctcgcctccaggagcccagctatgaactccttctccacaagcgccttcggtccagttgccttctccctggggctgctcctggtgttgcctgctgccttccctgccccagtacccccaggagaagattccaaagatgtagccgccccacacagacagccactcacctcttcagaacgaattgacaaacaaattcggtacatcctcgacggcatctcagccctgagaaaggagacatgtaacaagagtaacatgtgtgaaagcagcaaagaggcactggcagaaaacaacctgaaccttccaaagatggctgaaaaagatggatgcttccaatctggattcaatgaggagacttgcctggtgaaaatcatcactggtcttttggagtttgaggtatacctagagtacctccagaacagatttgagagtagtgaggaacaagccagagctgtgcagatgagtacaaaagtcctgatccagttcctgcagaaaaaggcaaagaatctagatgcaataaccacccctgacccaaccacaaatgccagcctgctgacgaagctgcaggcacagaaccagtggctgcaggacatgacaactcatctcattctgcgcagctttaaggagttcctgcagtccagcctgagggctcttcggcaaatgtagcatgggcacctcagattgttgttgttaatgggcattccttcttctggtcagaaacctgtccactgggcacagaacttatgttgttctctatggagaactaaaagtatgagcgttaggacactattttaattatttttaatttattaatatttaaatatgtgaagctgagttaatttatgtaagtcatatttatatttttaagaagtaccacttgaaacattttatgtattagttttgaaataataatggaaagtggctatgcagtttgaatatcctttgtttcagagccagatcatttcttggaaagtgtaggcttacctcaaataaatggctaacttatacatatttttaaagaaatatttatattgtatttatataatgtataaatggtttttataccaataaatggcattttaaaaaattc

SEQ ID NO: 10 - DNA, 1666 bp, Homo sapiens
ctccataaggcacaaactttcagagacagcagagcacacaagcttctaggacaagagccaggaagaaaccaccggaaggaaccatctcactgtgtgtaaacatgacttccaagctggccgtggctctcttggcagccttcctgatttctgcagctctgtgtgaaggtgcagttttgccaaggagtgctaaagaacttagatgtcagtgcataaagacatactccaaacctttccaccccaaatttatcaaagaactgagagtgattgagagtggaccacactgcgccaacacagaaattattgtaaagctttctgatggaagagagctctgtctggaccccaaggaaaactgggtgcagagggttgtggagaagtttttgaagagggctgagaattcataaaaaaattcattctctgtggtatccaagaatcagtgaagatgccagtgaaacttcaagcaaatctacttcaacacttcatgtattgtgtgggtctgttgtagggttgccagatgcaatacaagattcctggttaaatttgaatttcagtaaacaatgaatagtttttcattgtaccatgaaatatccagaacatacttatatgtaaagtattatttatttgaatctacaaaaaacaacaaataatttttaaatataaggattttcctagatattgcacgggagaatatacaaatagcaaaattgaggccaagggccaagagaatatccgaactttaatttcaggaattgaatgggtttgctagaatgtgatatttgaagcatcacataaaaatgatgggacaataaattttgccataaagtcaaatttagctggaaatcctggatttttttctgttaaatctggcaaccctagtctgctagccaggatccacaagtccttgttccactgtgccttggtttctcctttatttctaagtggaaaaagtattagccaccatcttacctcacagtgatgttgtgaggacatgtggaagcactttaagttttttcatcataacataaattattttcaagtgtaacttattaacctatttattatttatgtatttatttaagcatcaaatatttgtgcaagaatttggaaaaatagaagatgaatcattgattgaatagttataaagatgttatagtaaatttattttattttagatattaaatgatgttttattagataaatttcaatcagggtttttagattaaacaaacaaacaattgggtacccagttaaattttcatttcagataaacaacaaataattttttagtataagtacattattgtttatctgaaattttaattgaactaacaatcctagtttgatactcccagtcttgtcattgccagctgtgttggtagtgctgtgttgaattacggaataatgagttagaactattaaaacagccaaaactccacagtcaatattagtaatttcttgctggttgaaacttgtttattatgtacaaatagattcttataatattatttaaatgactgcatttttaaatacaaggctttatatttttaactttaagatgtttttatgtgctctccaaattttttttactgtttctgattgtatggaaatataaaagtaaatatgaaacatttaaaatataatttgttgtcaaagtaaaaaaaaaaaaaaa

SEQ ID NO: 11 - DNA, 4465 bp, Homo sapiens
caattgtcatacgacttgcagtgagcgtcaggagcacgtccaggaactcctcagcagcgcctccttcagctccacagccagacgccctcagacagcaaagcctacccccgcgccgcgccctgcccgccgctcggatgctcgcccgcgccctgctgctgtgcgcggtcctggcgctcagccatacagcaaatccttgctgttcccacccatgtcaaaaccgaggtgtatgtatgagtgtgggatttgaccagtataagtgcgattgtacccggacaggattctatggagaaaactgctcaacaccggaatttttgacaagaataaaattatttctgaaacccactccaaacacagtgcactacatacttacccacttcaagggattttggaacgttgtgaataacattcccttccttcgaaatgcaattatgagttatgtcttgacatccagatcacatttgattgacagtccaccaacttacaatgctgactatggctacaaaagctgggaagccttctctaacctctcctattatactagagcccttcctcctgtgcctgatgattgcccgactcccttgggtgtcaaaggtaaaaagcagcttcctgattcaaatgagattgtggaaaaattgcttctaagaagaaagttcatccctgatccccagggctcaaacatgatgtttgcattctttgcccagcacttcacgcatcagtttttcaagacagatcataagcgagggccagctttcaccaacgggctgggccatggggtggacttaaatcatatttacggtgaaactctggctagacagcgtaaactgcgccttttcaaggatggaaaaatgaaatatcagataattgatggagagatgtatcctcccacagtcaaagatactcaggcagagatgatctaccctcctcaagtccctgagcatctacggtttgctgtggggcaggaggtctttggtctggtgcctggtctgatgatgtatgccacaatctggctgcgggaacacaacagagtatgcgatgtgcttaaacaggagcatcctgaatggggtgatgagcagttgttccagacaagcaggctaatactgataggagagactattaagattgtgattgaagattatgtgcaacacttgagtggctatcacttcaaactgaaatttgacccagaactacttttcaacaaacaattccagtaccaaaatcgtattgctgctgaatttaacaccctctatcactggcatccccttctgcctgacacctttcaaattcatgaccagaaatacaactatcaacagtttatctacaacaactctatattgctggaacatggaattacccagtttgttgaatcattcaccaggcaaattgctggcagggttgctggtggtaggaatgttccacccgcagtacagaaagtatcacaggcttccattgaccagagcaggcagatgaaataccagtcttttaatgagtaccgcaaacgctttatgctgaagccctatgaatcatttgaagaacttacaggagaaaaggaaatgtctgcagagttggaagcactctatggtgacatcgatgctgtggagctgtatcctgcccttctggtagaaaagcctcggccagatgccatctttggtgaaaccatggtagaagttggagcaccattctccttgaaaggacttatgggtaatgttatatgttctcctgcctactggaagccaagcacttttggtggagaagtgggttttcaaatcatcaacactgcctcaattcagtctctcatctgcaataacgtgaagggctgtccctttacttcattcagtgttccagatccagagctcattaaaacagtcaccatcaatgcaagttcttcccgctccggactagatgatatcaatcccacagtactactaaaagaacgttcgactgaactgtagaagtctaatgatcatatttatttatttatatgaaccatgtctattaatttaattatttaataatatttatattaaactccttatgttacttaacatcttctgtaacagaagtcagtactcctgttgcggagaaaggagtcatacttgtgaagacttttatgtcactactctaaagattttgctgttgctgttaagtttggaaaacagtttttattctgttttataaaccagagagaaatgagttttgacgtctttttacttgaatttcaacttatattataagaacgaaagtaaagatgtttgaatacttaaacactatcacaagatggcaaaatgctgaaagtttttacactgtcgatgtttccaatgcatcttccatgatgcattagaagtaactaatgtttgaaattttaaagtacttttggttatttttctgtcatcaaacaaaaacaggtatcagtgcattattaaatgaatatttaaattagacattaccagtaatttcatgtctactttttaaaatcagcaatgaaacaataatttgaaatttctaaattcatagggtagaatcacctgtaaaagcttgtttgatttcttaaagttattaaacttgtacatataccaaaaagaagctgtcttggatttaaatctgtaaaatcagatgaaattttactacaattgcttgttaaaatattttataagtgatgttcctttttcaccaagagtataaacctttttagtgtgactgttaaaacttccttttaaatcaaaatgccaaatttattaaggtggtggagccactgcagtgttatctcaaaataagaatattttgttgagatattccagaatttgtttatatggctggtaacatgtaaaatctatatcagcaaaagggtctacctttaaaataagcaataacaaagaagaaaaccaaattattgttcaaatttaggtttaaacttttgaagcaaacttttttttatccttgtgcactgcaggcctggtactcagattttgctatgaggttaatgaagtaccaagctgtgcttgaataacgatatgttttctcagattttctgttgtacagtttaatttagcagtccatatcacattgcaaaagtagcaatgacctcataaaatacctcttcaaaatgcttaaattcatttcacacattaattttatctcagtcttgaagccaattcagtaggtgcattggaatcaagcctggctacctgcatgctgttccttttcttttcttcttttagccattttgctaagagacacagtcttctcatcacttcgtttctcctattttgttttactagttttaagatcagagttcactttctttggactctgcctatattttcttacctgaacttttgcaagttttcaggtaaacctcagctcaggactgctatttagctcctcttaagaagattaaaagagaaaaaaaaaggcccttttaaaaatagtatacacttattttaagtgaaaagcagagaattttatttatagctaattttagctatctgtaaccaagatggatgcaaagaggctagtgcctcagagagaactgtacggggtttgtgactggaaaaagttacgttcccattctaattaatgccctttcttatttaaaaacaaaaccaaatgatatctaagtagttctcagcaataataataatgacgataatacttcttttccacatctcattgtcactgacatttaatggtactgtatattacttaatttattgaagattattatttatgtcttattaggacactatggttataaactgtgtttaagcctacaatcattgatttttttttgttatgtcacaatcagtatattttctttggggttacctctctgaatattatgtaaacaatccaaagaaatgattgtattaagatttgtgaataaatttttagaaatctgattggcatattgagatatttaaggttgaatgtttgtccttaggataggcctatgtgctagcccacaaagaatattgtctcattagcctgaatgtgccataagactgaccttttaaaatgttttgagggatctgtggatgcttcgttaatttgttcagccacaatttattgagaaaatattctgtgtcaagcactgtgggttttaatatttttaaatcaaacgctgattacagataatagtatttatataaataattgaaaaaaattttcttttgggaagagggagaaaatgaaataaatatcattaaagataactcaggagaatcttctttacaattttacgtttagaatgtttaaggttaagaaagaaatagtcaatatgcttgtataaaacactgttcactgttttttttaaaaaaaaaacttgatttgttattaacattgatctgctgacaaaacctgggaatttgggttgtgtatgcgaatgtttcagtgcctcagacaaatgtgtatttaacttatgtaaaagataagtctggaaataaatgtctgtttatttttgtactattta

SEQ ID NO: 12 - DNA, 813 bp, Homo sapiens
agctggtttcagacttcagaaggacacgggcagcagacagtggtcagtcctttcttggctctgctgacactcgagcccacattccgtcacctgctcagaatcatgcaggtctccactgctgcccttgctgtcctcctctgcaccatggctctctgcaaccagttctctgcatcacttgctgctgacacgccgaccgcctgctgcttcagctacacctcccggcagattccacagaatttcatagctgactactttgagacgagcagccagtgctccaagcccggtgtcatcttcctaaccaagcgaagccggcaggtctgtgctgaccccagtgaggagtgggtccagaaatatgtcagcgacctggagctgagtgcctgaggggtccagaagcttcgaggcccagcgacctcggtgggcccagtggggaggagcaggagcctgagccttgggaacatgcgtgtgacctccacagctacctcttctatggactggttgttgccaaacagccacactgtgggactcttcttaacttaaattttaatttatttatactatttagtttttgtaatttattttcgatttcacagtgtgtttgtgattgtttgctctgagagttcccctgtcccctcccccttccctcacaccgcgtctggtgacaaccgagtggctgtcatcagcctgtgtaggcagtcatggcaccaaagccaccagactgacaaatgtgtatcggatgcttttgttcagggctgtgatcggcctggggaaataataaagatgctcttttaaaaggtaaaaaaaaaaaaaaaaaaa

SEQ ID NO: 13 - DNA, 667 bp, Homo sapiens
agcacaggacacagctgggttctgaagcttctgagttctgcagcctcacctctgagaaaacctctttgccaccaataccatgaagctctgcgtgactgtcctgtctctcctcatgctagtagctgccttctgctctccagcgctctcagcaccaatgggctcagaccctcccaccgcctgctgcttttcttacactgcgaggaagcttcctcgcaactttgtggtagattactatgagaccagcagcctctgctcccagccagctgtggtattccaaaccaaaagaagcaagcaagtctgtgctgatcccagtgaatcctgggtccaggagtacgtgtatgacctggaactgaactgagctgctcagagacaggaagtcttcagggaaggtcacctgagcccggatgcttctccatgagacacatctcctccatactcaggactcctctccgcagttcctgtcccttctcttaatttaatcttttttatgtgccgtgttattgtattaggtgtcatttccattatttatattagtttagccaaaggataagtgtcccctatggggatggtccactgtcactgtttctctgctgttgcaaatacatggataacacatttgattctgtgtgttttcataataaaactttaaaataaaatgcagacagtt

SEQ ID NO: 14 - DNA, 1351 bp, Homo sapiens
gtgatggagagcaccagcaaagccttagggcccatccctggcctcctgttacccacagaggggtaggcccttggctctcttccactatgacgtcagcttccattcttcctttcttatagacaattttccatttcaaggaaatcagagcccttaatagttcagtgaggtcactttgctgagcacaatcccatacccttcagcctctgctccacagagcctaagcaaaagatagaaactcacaacttccttgttttgttatctggaaattatcccaggatctggtgcttactcagcatattcaaggaaggtcttacttcattcttccttgattgtgaccatgcccaggctctctgctccctataaaaggcaggcagagccaccgaggagcagagaggttgagaacaacccagaaaccttcacctctcatgctgaagctcacacccttgccctccaagatgaaggtttctgcagcgcttctgtgcctgctgctcatggcagccactttcagccctcagggacttgctcagccagattcagtttccattccaatcacctgctgctttaacgtgatcaataggaaaattcctatccagaggctggagagctacacaagaatcaccaacatccaatgtcccaaggaagctgtgatcttcaagaccaaacggggcaaggaggtctgtgctgaccccaaggagagatgggtcagggattccatgaagcatctggaccaaatatttcaaaatctgaagccatgagccttcatacatggactgagagtcagagcttgaagaaaagcttatttattttccccaacctcccccaggtgcagtgtgacattattttattataacatccacaaagagattatttttaaataatttaaagcataatatttcttaaaaagtatttaattatatttaagttgttgatgttttaactctatctgtcatacatcctagtgaatgtaaaatgcaaaatcctggtgatgtgttttttgtttttgttttcctgtgagctcaactaagttcacggcaaaatgtcattgttctccctcctacctgtctgtagtgttgtggggtcctcccatggatcatcaaggtgaaacactttggtattctttggcaatcagtgctcctgtaagtcaaatgtgtgctttgtactgctgttgttgaaattgatgttactgtatataactatggaattttgaaaaaaaatttcaaaaagaaaaaaatatatataatttaaaactaaaaaaaaaaaaaaaaaaaaaaaaaaaaaaaaaaaaaaaaaaaaaaaaaaaaaaaaaaaaaaaaaaaaaaaaaaaaaaaaaaaaaaaaaaaaaaaaaaaaaa

SEQ ID NO: 15 - DNA, 2646 bp, Homo sapiens
gacttctgcagtttctgtttccttgactggcagctcagcggggccctcccgcttggatgttccgggaaagtgatgtgggtaggacaggcggggcgagccgcaggtgccagaacacagattgtataaaaggctgggggctggtggggagcaggggaagggaatgtgaccaggtctaggtctggagtttcagcttggacactgagccaagcagacaagcaaagcaagccaggacacaccatcctgccccaggcccagcttctctcctgccttccaacgccatggggagcaatctcagcccccaactctgcctgatgccctttatcttgggcctcttgtctggaggtgtgaccaccactccatggtctttggcccggccccagggatcctgctctctggagggggtagagatcaaaggcggctccttccgacttctccaagagggccaggcactggagtacgtgtgtccttctggcttctacccgtaccctgtgcagacacgtacctgcagatctacggggtcctggagcaccctgaagactcaagaccaaaagactgtcaggaaggcagagtgcagagcaatccactgtccaagaccacacgacttcgagaacggggaatactggccccggtctccctactacaatgtgagtgatgagatctctttccactgctatgacggttacactctccggggctctgccaatcgcacctgccaagtgaatggccgatggagtgggcagacagcgatctgtgacaacggagcggggtactgctccaacccgggcatccccattggcacaaggaaggtgggcagccagtaccgccttgaagacagcgtcacctaccactgcagccgggggcttaccctgcgtggctcccagcggcgaacgtgtcaggaaggtggctcttggagcgggacggagccttcctgccaagactccttcatgtacgacacccctcaagaggtggccgaagctttcctgtcttccctgacagagaccatagaaggagtcgatgctgaggatgggcacggcccaggggaacaacagaagcggaagatcgtcctggacccttcaggctccatgaacatctacctggtgctagatggatcagacagcattggggccagcaacttcacaggagccaaaaagtgtctagtcaacttaattgagaaggtggcaagttatggtgtgaagccaagatatggtctagtgacatatgccacataccccaaaatttgggtcaaagtgtctgaagcagacagcagtaatgcagactgggtcacgaagcagctcaatgaaatcaattatgaagaccacaagttgaagtcagggactaacaccaagaaggccctccaggcagtgtacagcatgatgagctggccagatgacgtccctcctgaaggctggaaccgcacccgccatgtcatcatcctcatgactgatggattgcacaacatgggcggggacccaattactgtcattgatgagatccgggacttgctatacattggcaaggatcgcaaaaacccaagggaggattatctggatgtctatgtgtttggggtcgggcctttggtgaaccaagtgaacatcaatgctttggcttccaagaaagacaatgagcaacatgtgttcaaagtcaaggatatggaaaacctggaagatgttttctaccaaatgatcgatgaaagccagtctctgagtctctgtggcatggtttgggaacacaggaagggtaccgattaccacaagcaaccatggcaggccaagatctcagtcattcgcccttcaaagggacacgagagctgtatgggggctgtggtgtctgagtactttgtgctgacagcagcacattgtttcactgtggatgacaaggaacactcaatcaaggtcagcgtaggaggggagaagcgggacctggagatagaagtagtcctatttcaccccaactacaacattaatgggaaaaaagaagcaggaattcctgaattttatgactatgacgttgccctgatcaagctcaagaataagctgaaatatggccagactatcaggcccatttgtctcccctgcaccgagggaacaactcgagctttgaggcttcctccaactaccacttgccagcaacaaaaggaagagctgctccctgcacaggatatcaaagctctgtttgtgtctgaggaggagaaaaagctgactcggaaggaggtctacatcaagaatggggataagaaaggcagctgtgagagagatgctcaatatgccccaggctatgacaaagtcaaggacatctcagaggtggtcacccctcggttcctttgtactggaggagtgagtccctatgctgaccccaatacttgcagaggtgattctggcggccccttgatagttcacaagagaagtcgtttcattcaagttggtgtaatcagctggggagtagtggatgtctgcaaaaaccagaagcggcaaaagcaggtacctgctcacgcccgagactttcacatcaacctctttcaagtgctgccctggctgaaggagaaactccaagatgaggatttgggttttctataaggggtttcctgctggacaggggcgtgggattgaattaaaacagctgcgacaacaaaaaaaaaaaaaaaaaaaa

SEQ ID NO: 16 - DNA, 1234 bp, Homo sapiens; identical to SEQ ID NO: 5

SEQ ID NO: 17 - DNA, 1498 bp, Homo sapiens
accaaacctcttcgaggcacaaggcacaacaggctgctctgggattctcttcagccaatcttcattgctcaagtgtctgaagcagccatggcagaagtacctgagctcgccagtgaaatgatggcttattacagtggcaatgaggatgacttgttctttgaagctgatggccctaaacagatgaagtgctccttccaggacctggacctctgccctctggatggcggcatccagctacgaatctccgaccaccactacagcaagggcttcaggcaggccgcgtcagttgttgtggccatggacaagctgaggaagatgctggttccctgcccacagaccttccaggagaatgacctgagcaccttctttcccttcatctttgaagaagaacctatcttcttcgacacatgggataacgaggcttatgtgcacgatgcacctgtacgatcactgaactgcacgctccgggactcacagcaaaaaagcttggtgatgtctggtccatatgaactgaaagctctccacctccagggacaggatatggagcaacaagtggtgttctccatgtcctttgtacaaggagaagaaagtaatgacaaaatacctgtggccttgggcctcaaggaaaagaatctgtacctgtcctgcgtgttgaaagatgataagcccactctacagctggagagtgtagatcccaaaaattacccaaagaagaagatggaaaagcgatttgtcttcaacaagatagaaatcaataacaagctggaatttgagtctgcccagttccccaactggtacatcagcacctctcaagcagaaaacatgcccgtcttcctgggagggaccaaaggcggccaggatataactgacttcaccatgcaatttgtgtcttcctaaagagagctgtacccagagagtcctgtgctgaatgtggactcaatccctagggctggcagaaagggaacagaaaggtttttgagtacggctatagcctggactttcctgttgtctacaccaatgcccaactgcctgccttagggtagtgctaagaggatctcctgtccatcagccaggacagtcagctctctcctttcagggccaatccccagcccttttgttgagccaggcctctctcacctctcctactcacttaaagcccgcctgacagaaaccacggccacatttggttctaagaaaccctctgtcattcgctcccacattctgatgagcaaccgcttccctatttatttatttatttgtttgtttgttttattcattggtctaatttattcaaagggggcaagaagtagcagtgtctgtaaaagagcctagtttttaatagctatggaatcaattcaatttggactggtgtgctctctttaaatcaagtcctttaattaagactgaaaatatataagctcagattatttaaatgggaatatttataaatgagcaaatatcatactgttcaatggttctgaaataaacttcactgaag

SEQ ID NO: 18 - DNA, 1828 bp, Homo sapiens
ctacaaggaggcaggcaagacagcaaggcatagagacaacatagagctaagtaaagccagtggaaatgaagagtcttccaatcctactgttgctgtgcgtggcagtttgctcagcctatccattggatggagctgcaaggggtgaggacaccagcatgaaccttgttcagaaatatctagaaaactactacgacctcaaaaaagatgtgaaacagtttgttaggagaaaggacagtggtcctgttgttaaaaaaatccgagaaatgcagaagttccttggattggaggtgacggggaagctggactccgacactctggaggtgatgcgcaagcccaggtgtggagttcctgatgttggtcacttcagaacctttcctggcatcccgaagtggaggaaaacccaccttacatacaggattgtgaattatacaccagatttgccaaaagatgctgttgattctgctgttgagaaagctctgaaagtctgggaagaggtgactccactcacattctccaggctgtatgaaggagaggctgatataatgatctcttttgcagttagagaacatggagacttttacccttttgatggacctggaaatgttttggcccatgcctatgcccctgggccagggattaatggagatgcccactttgatgatgatgaacaatggacaaaggatacaacagggaccaatttatttctcgttgctgctcatgaaattggccactccctgggtctctttcactcagccaacactgaagctttgatgtacccactctatcactcactcacagacctgactcggttccgcctgtctcaagatgatataaatggcattcagtccctctatggacctccccctgactcccctgagacccccctggtacccacggaacctgtccctccagaacctgggacgccagccaactgtgatcctgctttgtcctttgatgctgtcagcactctgaggggagaaatcctgatctttaaagacaggcacttttggcgcaaatccctcaggaagcttgaacctgaattgcatttgatctcttcattttggccatctcttccttcaggcgtggatgccgcatatgaagttactagcaaggacctcgttttcatttttaaaggaaatcaattctgggctatcagaggaaatgaggtacgagctggatacccaagaggcatccacaccctaggtttccctccaaccgtgaggaaaatcgatgcagccatttctgataaggaaaagaacaaaacatatttctttgtagaggacaaatactggagatttgatgagaagagaaattccatggagccaggctttcccaagcaaatagctgaagactttccagggattgactcaaagattgatgctgtttttgaagaatttgggttcttttatttctttactggatcttcacagttggagtttgacccaaatgcaaagaaagtgacacacactttgaagagtaacagctggcttaattgttgaaagagatatgtagaaggcacaatatgggcactttaaatgaagctaataattcttcacctaagtctctgtgaattgaaatgttcgttttctcctgcctgtgctgtgactcgagtcacactcaagggaacttgagcgtgaatctgtatcttgccggtcatttttatgttattacagggcattcaaatgggctgctgcttagcttgcaccttgtcacatagagtgatctttcccaagagaaggggaagcactcgtgtgcaacagacaagtgactgtatctgtgtagactatttgcttatttaataaagacgatttgtcagttattttatctt

SEQ ID NO: 19 - DNA, 2382 bp, Homo sapiens
agtacacagagagaaaggctaaagttctctggaggatgtggctgcagagcctgctgctcttgggcactgtggcctgcagcatctctgcacccgcccgctcgcccagccccagcacgcagccctgggagcatgtgaatgccatccaggaggcccggcgtctcctgaacctgagtagagacactgctgctgagatggtaagtgagagaatgtgggcctgtgcctaggccacccagctggcccctgactggccacgcctgtcagcttgataacatgacattttccttttctacagaatgaaacagtagaagtcatctcagaaatgtttgacctccaggtaagatgcttctctctgacatagctttccagaagcccctgccctggggtggaggtggggactccattttagatggcaccacacagggttgtccactttctctccagtcagctggctgcaggaggagggggtagcaactgggtgctcaagaggctgctggccgtgcccctatggcagtcacatgagctcctttatcagctgagcggccatgggcagacctagcattcaatggccaggagtcaccaggggacaggtggtaaagtgggggtcacttcatgagacaggagctgtgggtttggggcgctcactgtgccccgagaccaagtcctgttgagacagtgctgactacagagaggcacagaggggtttcaggaacaacccttgcccacccagcaggtccaggtgaggccccacccccctctccctgaatgatggggtgagagtcacctccttccctaaggctgggctcctctccaggtgccgctgagggtggcctgggcggggcagtgagaagggcaggttcgtgcctgccatggacagggcagggtctatgactggacccagcctgtgcccctcccaagccctactcctgggggctgggggcagcagcaaaaaggagtggtggagagttcttgtaccactgtgggcacttggccactgctcaccgacgaacgacattttccacaggagccgacctgcctacagacccgcctggagctgtacaagcagggcctgcggggcagcctcaccaagctcaagggccccttgaccatgatggccagccactacaagcagcactgccctccaaccccggtgagtgcctacggcagggcctccagcaggaatgtcttaatctagggggtggggtcgacatggggagagatctatggctgtggctgttcaggaccccagggggtttctgtgccaacagttatgtaatgattagccctccagagaggaggcagacagcccatttcatcccaaggagtcagagccacagagcgctgaagcccacagtgctccccagcaggagctgctcctatcctggtcattattgtcattatggttaatgaggtcagaggtgagggcaaacccaaggaaacttggggcctgcccaaggcccagaggaagtgcccaggcccaagtgccaccttctggcaggactttcctctggccccacatggggtgcttgaattgcagaggatcaaggaagggaggctacttggaatggacaaggacctcaggcactccttcctgcgggaagggagcaaagtttgtggccttgactccactccttctgggtgcccagagacgacctcagcccagctgccctgctctgccctgggaccaaaaaggcaggcgtttgactgcccagaaggccaacctcaggctggcacttaagtcaggcccttgactctggctgccactggcagagctatgcactccttggggaacacgtgggtggcagcagcgtcacctgacccaggtcagtgggtgtgtcctggagtgggcctcctggcctctgagttctaagaggcagtagagaaacatgctggtgcttccttcccccacgttacccacttgcctggactcaagtgttttttatttttctttttttaaaggaaacttcctgtgcaacccagattatcacctttgaaagtttcaaagagaacctgaaggactttctgcttgtcatcccctttgactgctgggagccagtccaggagtgagaccggccagatgaggctggccaagccggggagctgctctctcatgaaacaagagctagaaactcaggatggtcatcttggagggaccaaggggtgggccacagccatggtgggagtggcctggacctgccctgggccacactgaccctgatacaggcatggcagaagaatgggaatattttatactgacagaaatcagtaatatttatatatttatatttttaaaatatttatttatttatttatttaagttcatattccatatttattcaagatgttttaccgtaataattattattaaaaatatgcttctacttg

SEQ ID NO: 20 - DNA, 9129 bp, Homo sapiens
agtcacttgccatttctcataacagcgtcagagagaaagaactgactgaaacgtttgaggtaagaaaggtcttaaatatcattgtaaactaagattgtatatctattttgtaaatatagatatatagcatctctccatatatttttctttaaatcataaaaattttaattgttgagactaaattgtaatggttgcttgaatttgtagacttagtaattagaaaaccatttttagtattctgtttgcaaaactttttttaaaatcaccaccctgctgtagtaaatatttattttagagtgaccataaatgaatctttctaggagtggagcactggtgggggagagtgtggacagagtgaaacaacagagcctcaggtttatttttaaatttgtggccatcaggtcagcaaacagagggaatacgccccgccagagattctctaaagtctgagcaagtgccaatttctttggcctcctcttttatctttaaaatatatacagtacttacattccattccataacattttatgttgattttaatataaaagtcatttgtctttcccataaactcttgaataaaattaattatctaggaagatgcatctgatttatctggagaatcatttattctacagcacgcagcaataaactgctatgggtatcatgacttgataagtataaaaataaaaggagatagctggtaattatgctgtgtcctgactctaagatatgatctggaagagtctgtaatgtggattatttacttatttgcttaatgtagttttgaataattcttgaaaccagttgaaagaaattatattgtaaaggccctgcttgaattctattctctccaaaactattttctcaacctgcctctttcttcttctaaatactcaaaatattttgcaatttctacatatggtatatatcacgcttttttttcacattacagaaatatctgtatccatcttccatgtggaagtctcaagtggaagaaattatgctttatcattgtatccctgaaagcacccagcattgttgctttgcacatagaaagtggactatgtatatgtatgtgtgtgtctgtgaggagtatgtgtgagtgtgtgcatgtgtgtgtttgtataatttttactcttgatttcctacattaacaatctgcctgtagaagtctgaacttgaccggaattttacattcctgtcttctcaaaattattagattatctggtacttttttgaatttgaattcaaattttgattagtatcagaaaataaaggcagagatcaaaactttgctacattttttacactgcgttcttttgtctcatagatgtataggaaacatcaaaaggtgataaaatttccctagaatctccactatctcaaaggtacttcaaaatgataatgatattaaaaattgacattttccccaatgtaaaatattaaattaaatagtctttaaaaagctttgtaatgtatttacttataacaatgtaacagtgagcttaaaagatccataaatcagggactttccaaactgatattacaggcaaacttcagagatactgcaggttcagttcttgaccaccaccatagaatgagtatcaaagttaggcaggtcaaatgaatttcttggattcccagtgtacataaaagttatgattacactacagcattgtatgttaagtgtaatagcagtatgtctagaaaaacaacatacatatcttaattaaaacatactttattgctcaaaaatgctaacaattatctcagtcttcactgagtcataatctttttgctggtgtagggtcttgccttgatgttgatggctgctgaatgatcagggtgatggttcctgaaggctaagctggctgtggcaatttcttaaaataagtcaacaatgaagtttgacacacagattgactcttcctttcacaaaagatttctctgtagcatgcgatgttgtagcattttggagcatgtgaagcattttgcccacagtatttctttcaaaatgggactcaacccttgcaaaccctgccactgctttatcaattaagtttatgtagtattttaaatcatttactgtcatttgaaaaatattcacagcatcttcaccaggagtagattccatctcaagaaaccactttctttgctcatccataagaagccatttttcattcattcaagttttaccgttagattgaagcaattaagtcacatgttcaagcttcacttctaattctagttctcttgctatttccaccacatctgcaagttacttcctccactgaagtcttgaatccctcaaagtcatccacaagagttggaatcaacttctcccaaactcctgtaatgttgatattttggcctcctcctatgaatcacaaatggtcttaatggcatctggagtggtgtatattttacagaaggtttttaatttactttgcccagatccatcaaataaatcactatctgtgccagctatagccttacaaaatgtatttatttaataatgaaacctgaaagtcaaatttactctttgatccataggctgcagaatggatgttgtgttagcaggcatgaaaacaacattcatctctttgtacatctgcttcagagttcttgggggctcaggtacattttcaatgaatggcaatattttgaaaaaaacattttttcctaagaagtgagctgaaaatattagtaaaccatgctgtgttagatgtactgccatccaggctttgttgttccatccacagagcacaggaagagtagatttagtataattcttaagggcactacgattttctaaatgataaatgagcattggcttcaatttaggaaaccagctctatccctttaaaagagtcagcctgtcctttgaagctttgaagccaggcattgttttcttctctttagctatgaaagttctagatggtatctttctccaaaataagactgtttcgtccacaataaaaatctattatttattgtagtgttcttagatagattttctggataacactgcagcctctatatcaacacttgctgctttaccttgcacttttatgttatagccaatctctgctagcttccaacttttcatctgcagtttcttcacatctctcaatctttgtataattaaagagcataggggccttcttctagattaggcttctgcttaataaaatgtgctggctggtttgatctatccagacaactaaaaactttctccatgttgggaataagactctttcgctttcttgtcattcctgtgttcattgtagtagcacttttaattcccttcaaaacttttccttcgcattcacaacttggctaactagttgttgcaagatcctagctttcagcttatcttggcttttgacattccttcttcactaaatcgtttttaccttttgatgtaaagtaggagacatgcgactcttcctttcactagaacacttagaaggcattgtagggttattaactggcccagatttaatattatcatgtctcaggaaatagaaaagcctgaggagaggaagagataactgggggcatggccagtgagtggagcaatcgaaacattcacaagatttatcaaataagtttgccacttatttttcccataacacccccaaataattagatcaaagtaacaccaccaaagaccactgatcacagatcaccataaaagatataataaaatattattacatctttataatgtcttatagatatcaaaatatcttataatactgaaaactttaaaatattgctaggattaccaaaatatgacacagagacatgcagtgagcatgtgctgttggaaaaatggtgctgatagacttgctcgatgccggattgccacaaattgccactcaattagtaaaaaacaagatatgtatgaagtgcaataaaatgaggtgtgcctgtatatacacaacacctagaataacatctcatgcttagtcagttatcaagaaaacctttataaactaataaattaacaaatatgaggcaaatttcaagtaaagtcccctagccaatctccattttcaacttgattgcctttcccagaaccccccacatattctttagcacatactgcattcacaccatgacaaagaagaggattaatgcctaatgataccatccaatatggaagatttcccattattatttgaaatcaagtaatatgcacatgtttattgtattaatgacaaatatttataaatgcaaatgttctgtttcattgtgtactccattataaaattattgaataaatctttaatttagctcagttttctcaaatataatattaacaatattgtaactgatacattttaacagtgtgtgtaatatgataaggaatctacagtgaaaattaaaatacaataaaatgctttggaaagtcctttatcatttattaaataataaaacttgaaagtcaaaattactctatgatccatggactgcaggatggattttgtgttagcaggcaagaaaagagatccttcttcacatcgtggatttttgggggttgcctggaaccagtgcaaataaatctgtcacctacattactttcatggacattagtatatggaatgttgaactctctgagatcactaaataaccgcttacttccaaactaacattctctgtataaaccaatgcattatttcttccagaaacttttctgtgattatcaagtatgtagaagtgttattcttttattttttattttaagttcagggatacatgtgtaggtttgttacataggaattagtattcttaaataatatgttaatgtttatttttaaagcaattggtgtaatatagttatgaaattacaaagctcctttgctttgacctttaaaaagttctttattaacaaatagattgattccctaagattgtaagtgacttgctcaaactcaaagagctatttgtcaaataattcgtactttaactggatcttttaaattcatggtcttttagctgacttctaggatatttatgaataaaatgaaagttcttcttattttttatttactccattttgcagatgaagaaagttctcctcctgatcacagccatcttggcagtggctgttggtttcccagtaagtatccacgtatacattccaaaatatttatgtatggccatgtatggcatatttatgtcaaccaggaaccacatacacaagggtggtcccaaaagattataacagagctaccaagtgcagtggcttacgcctgtattccctgtaatttgggaggtcaaggcaggagaatcacttgagcccacaagttcaagaccagcctgggcaacatagcaatcccctctctataaaaaaaaatatatatataatgaacctaatgacattgtggccatcattatgtcatagggcaatgcattagtcatgtgttcatgtgtttgagatgatgctggtgtaaacaaacctaccctctgccagtcatataagaatagagcacaaaaaattatgcacagttcataataataaacaactatgttactggtttgtgtattaattatactatgcttttatcattattttagagttaactccttctactattttttaaacattaactgtaaaacagcctcagacaggtccttcaggaggtattccataagaaaccattattgtcataggagatgatagttccacatgtctaactgcccctgaagatcttccagtaggaaaagatggggaggtggaaagcagtgacattgatgaccctgaccctctggaagcctaagctaatgtatatgtttatgtctcagttttaaacaaaatagtttaaaagtaaaaaagaaaaagcatatagaataaggatacaaagagtgaaagtatttttgtacagctgtaaaatgtgtttgttttaagctaagtgttattacaaaagagttaaagtaaaatagttatagtaagctaaggttaatttattatcaagggaagaaaaagatgtttttataaggttagtgtagtgtaagtgtacagtgtttacaaagtccacaggagtaaacagtaatgtcctaggccttcatatacaataactcacttactaactcacacagagcaacttccagtcctgaaagctttatttatggtacataacctatacaagtgtataggtataaaggataccattttccatcttttatactgtattttttactgtaccttttctatgtttagctatgtcttagatatgtttagatatacaaatacttaccactgtgttacaactgcttacagtattcaggatagtaatatgccatacagttttgtagtctaggagtaagagactatactgtctagcttagttatgtagtaggctataccacctaggtttgtgtaaggacactctatgatgttcacatgatgaaatcgctgaactacccatttctcataacttatctctgctgttaggcaatgcatgactctatattttgtcttgattcatgaatcttaagggtttttttctccttcacaggctgtattctgtaagaatacctaacacacacgctgtattctgtaagaatacctaacacctgcccttttatcattacagtccagaaaatactataaaccatatactgttcagtgcataattcagttccacatatctttggtgtagtggtgaatttgagccatttaagaatacatgttaagactttttgggaaaatcatttctacatttctagacaaattatgggtattttaaaaaatggttattatgaaacaatattaggtaatagattgtcatgcatatgtatatatttatttgtgtgttttcatgagcatgagtttaattaatttcactatttgatctttaggtctctcaagaccaggaacgagaaaaaagaagtgtaagttaccttttctcttttttacatgtaagttttacacgtgaaatattcataactattgttaaagatattgatttatctaaacctcccaaactgtggagagattcataaagagcttttggtattagcactcaacagaggtttagacttcaggtatttgagctctgctcatagaaaggaaattatctccatatctcatgtcacggtaaaaattggattgaaatccgaatcactctgtgatgatttgggttgcaatattttttactagatttatctagcctaataactcagacctccactctgccatagctctatgaaactcatttcaaaaaaagtaaaaaatgaaacctgagcattaagagatgtgggccagctttgatgatcctcccagtggcaaattcactcatggattatttgggtctaaacagttaactaaaattgtttaataaaaggaaaataaaatttgaagagggaaagccttgtttaaaggtttgtttttatttatggaaatcctgttatctggaaagcatgattttatcgcaaaaactacaaacagagagttaagaatacaaaaattaatagagacacaaacagataattgagagcaaaagcaggaagaaggaactgagataatgaaagagagaagttgtttcctacatgtggtttgggtaaagaccttgcatgaagacaaagggagaaattttatggtaccgcaacaccacattcatcttggccttgtaggtaaagaagtgattgccagaaaaacttgcctttaactggaaaggtataggaacatgagtatctctaaataatttttaaatgatgcaaattaataaactccctgtccatagtacacacagaaaggataaaggattttagagcttctaaagcctcttcctaaaaataaaggcccattatttaaaaagcaaagctgttttatttctcttctttgtaaaaagtgaaataaaccctttaacttctttctttcaacagatcagtgacagcgatgaattagcttcagggttttttgtgttcccttacccatatccatttcgcccacttccaccaattccatttccaagatttccatggtttagacgtaattttcctattccaatacctgaatctgcccctacaactccccttcctagcgaaaagtaaacaagaaggaaaagtcacgataaacctggtaagtacacatagttacaatcatagtttattttaagtttgcagattggaatccataatttcaaggaaaaaaaaatgttaactatgtccctagttggcccctttcagtttctgtttgttttaatgtttttctctggtagatactgtcacgtgtgtccactcagaaatacacatgtgcccttccatgatctaaccagcacagcactttaaatccctccttggttgtgatgtaacagaaacaatttcaattttattaaaatattgtttacaaagtatttgtaactctttatactattgtcaataactgcattttggactgaatcagagtaaccaaggtggagatcatagtagatgaagttatgggcctagagtttaaagtagaccagcttagcccttagagaaacatgtaatttttctaatactaaaactccaaacctagcttccaagtgtcacattatagtaaaattttaaaggcttcatgcttcacctataacagtggcccctgtcatttcatcacatcaaaaacaaagtggatggtgtgtcaattactagataaattgaggaaatataatctatactatagactatagatctaatctactataataatttataatttaatatatataatttaatcttatctaagattaaattagaacccagaggactgttctaggaaaaaaatatttcagctactacttaccactaaagacctttgctttctttctacatcttgagcagatggtttcccagtccttgaactagatatatttttaagccaatagttgtcattaaaatgcagaaaatgtatatgtttccaagaaaatgacccattgcaattaataaccatatgtctgttatttatttcaggtcacctgaaattgaaattgagccacttccttgaagaatcaaaattcctgttaataaaagaaaaacaaatgtaattgaaatagcacacagcattctctagtcaatatctttagtgatcttctttaataaacttgaaagcaaagattttggtttcttaatttccacaaa

SEQ ID NO: 21 - DNA, 2453 bp, Homo sapiens
agtcgtggccccaggtaatttcctcccaggcctccatggggttatgtataaaggcccccctagagctgggccccaaaacagcccggagcctgcagcccagccccacccagacccatggctggacctgccacccagagccccatgaagctgatgggtgagtgtcttggcccaggatgggagagccgcctgccctggcatgggagggaggctggtgtgacagaggggctggggatccccgttctgggaatggggattaaaggcacccagtgtccccgagagggcctcaggtggtagggaacagcatgtctcctgagcccgctctgtccccagccctgcagctgctgctgtggcacagtgcactctggacagtgcaggaagccacccccctgggccctgccagctccctgccccagagcttcctgctcaagtgcttagagcaagtgaggaagatccagggcgatggcgcagcgctccaggagaagctggtgagtgaggtgggtgagagggctgtggagggaagcccggtggggagagctaagggggatggaactgcagggccaacatcctctggaagggacgtgggagaatattaggagcagtggagctggggaaggctgggaagggacttggggaggaggaccttggtggggacagtgctcgggagggctggctgggatgggagtggaggcattacattcaggagaaagggcaagggcccctgtgagatcagagagtgggggtgcagggcagagaggaactgaacagcctggcaggacatggagggaggggaaagaccagagagtcggggaggacccgggaaggagcggcgacccggccatggcgagtctcactcagcatccttccatccccagtgtgccacctacaagctgtgccaccccgaggagctggtgctgctcggacactctctgggcatcccctgggctcccctgagcagctgccccagccaggccctgcagctggtgagtgtcaggaaaggataaggctaatgaggagggggaaggagaggaggaacacccatgggctcccccatgtctccaggttccaagctgggggcctgacgtatctcaggcagcaccccctaactcttccgctctgtctcacaggcaggctgcttgagccaactccatagcggccttttcctctaccaggggctcctgcaggccctggaagggatctcccccgagttgggtcccaccttggacacactgcagctggacgtcgccgactttgccaccaccatctggcagcaggtgagccttgttgggcagggtggccaaggtcgtgctggcattctgggcaccacagccaggcctgtgtatgggccctgtccatgctgtcacccccagcatttcctcatttgtaataacgcccactcagaagggcccaaccactgatcacagctttcccccacagatggaagaactgggaatggcccctgccctgcagcccacccagggtgccatgccggccttcgcctctgctttccagcgccgggcaggaggggtcctggttgcctcccatctgcagagcttcctggaggtgtcgtaccgcgttctacgccaccttgcccagccctgagccaagccctccccatcccatgtatttatctctatttaatatttatgtctatttaagcctcatatttaaagacagggaagagcagaacggagccccaggcctctgtgtccttccctgcatttctgagtttcattctcctgcctgtagcagtgagaaaaagctcctgtcctcccatcccctggactgggaggtagataggtaaataccaagtatttattactatgactgctccccagccctggctctgcaatgggcactgggatgagccgctgtgagcccctggtcctgagggtccccacctgggacccttgagagtatcaggtctcccacgtgggagacaagaaatccctgtttaatatttaaacagcagtgttccccatctgggtccttgcacccctcactctggcctcagccgactgcacagcggcccctgcatccccttggctgtgaggcccctggacaagcagaggtggccagagctgggaggcatggccctggggtcccacgaatttgctggggaatctcgtttttcttcttaagacttttgggacatggtttgactcccgaacatcaccgacgcgtctcctgtttttctgggtggcctcgggacacctgccctgcccccacgagggtcaggactgtgactctttttagggccaggcaggtgcctggacatttgccttgctggacggggactggggatgtgggagggagcagacaggaggaatcatgtcaggcctgtgtgtgaaaggaagctccactgtcaccctccacctcttcaccccccactcaccagtgtcccctccactgtcacattgtaactgaacttcaggataataaagtgtttgcctcca

SEQ ID NO: 22 - DNA, 1914 bp, Homo sapiens
aaagaggagagctggtttcagacttcagaaggacacgggcagcagacagtggtcagtcctttcttggctctgctgacactcgagcccacattccgtcacctgctcagaatcatgcaggtctccactgctgcccttgctgtcctcctctgcaccatggctctctgcaaccagttctctgcatcacgtgagtctgagtttcgttgtgggtatcaccactctctggccatggttagaccacatcaatcttttcttgtggcctaaaagcccccaagagaaaagagaacttcttaaagggctgccaaacatcttggtctttctctttaagacttttatttttatctctagaaggggtcttagccccctagtctccaggtatgagaatctaggcaggggcaggggagttacagtcccttttacagatagaaaaacagggttcgaaacgaatcagttagcaagaggcagaatccagggctgcttacttcccagtggggtatgttgttcactctccagctcactctaggtctcccaggagctctgtcccttggatgtcttatgagagatgtccaaggcttctcttgggttggggtatgacttcttgaaccagacaaaattccctgaagagaactgagataagagaacagtccgttcaggtatctggatcacacagagaaacagagaacccactatgaagagtcaaggagaaagaaggatacagacagaaacaaagagacatttctcagcaaaaatgcccaaatgccttccagtcacttggtctgagcaagcctgccttcctcaactgctcggggatcagaagctgcctggccttttcttctgagctgtgactcgggctcattctcttcctttctccacagttgctgctgacacgccgaccgcctgctgcttcagctacacctcccggcagattccacagaatttcatagctgactactttgagacgagcagccagtgctccaagcccggtgtcatgtaagtgccagtcttcctgctcacctctatggaggtagggagggtcagggttggggcagagacaggccagaaggctatcctggaaaggcccagccttcaggagcctatcggggatacaggacgcagggctccgaggtgtgacctgacttggagctggagtgaggcatgtgttacagagtcaggaagggctgccccagcccagaggaaagggacaggaagaaggaggcagcgggacactctgagggccacccctactgagtcactgagagaagctctctagacagagataggcagggggcccctgaaagaggagcaagccctgagctgcccaggacagagagcagaatggtggggccatggtgggcccaggattcccctgctggattccccagtgcttaactcttcctcccttctccacagcttcctaaccaagcgaagccggcaggtctgtgctgaccccagtgaggagtgggtccagaaatatgtcagcgacctggagctgagtgcctgaggggtccagaagcttcgaggcccagcgacctcggtgggcccagtggggaggagcaggagcctgagccttgggaacatgcgtgtgacctccacagctacctcttctatggactggttgttgccaaacagccacactgtgggactcttcttaacttaaattttaatttatttatactatttagtttttgtaatttattttcgatttcacagtgtgtttgtgattgtttgctctgagagttcccctgtcccctcccccttccctcacaccgcgtctggtgacaaccgagtggctgtcatcagcctgtgtaggcagtcatggcaccaaagccaccagactgacaaatgtgtatcggatgcttttgttcagggctgtgatcggcctggggaaataataaagatgctcttttaaaaggtaaa

SEQ ID NO: 23 - DNA, 6784 bp, Homo sapiens
actctcactctcctccgctcaaactcagctcacttgagagtctcctcccgccagctgtggaaagaactttgcgtctctccagcaatgcatctccttgcgattctgttttgtgctctctggtctgcagtgttggccgagaactcggatgattatgatctcatgtatgtgaatttggacaacgaaatagacaatggactccatcccactgaggaccgtaagttcactttaactgtttctctgctaaccctgactacatatccacctcttggtctaaataacacacatatactttgtggccagtgagacaagttaaaaatttatagcttgttatgcaaaagtgagaagcacttgaagaaagatggaggtttcaaagttatttctgtaacgtacataatgggttgaatcatatcaaatcgtcaatatttgactgttttgagctacataaccggcgatttcatagggtacaacttaatctatacctgaatgaatgatttctgtcgtttctgagacatttacatgctgtttttcggaggtgtccttaaagggaaggggaatgccaggaacgggctgcaacttggcaccaccgagggaggtcagcttttacaaagcacatccaaggcaggcctgggcgggctgctaacgtgtgtgtatcccgtactctagccacgccgtgcgcctgcggtcaggagcactcggaatgggacaagctcttcatcatgctggagaactcgcagatgagagagcgcatgctgctgcaagccacggacgacgtcctgcggggcgagctgcagaggctgcgggaggagctgggccggctcgcggaaagcctggcgaggccgtgcgcgccgggggctcccgcagaggccaggctgaccagtgctctggacgagctgctgcaggcgacccgcgacgcgggccgcaggctggcgcgtatggagggcgcggaggcgcagcgcccagaggaggcggggcgcgccctggccgcggtgctagaggagctgcggcagacgcgagccgacctgcacgcggtgcagggctgggctgcccggagctggctgccggcaggtaaggaggcaagcggggccgggacctcccactgcggctttgttccgggagcgcgcgtaacggcaagccaagccaggcaaccttctaggggaagctttcatgggaagcgcgcgcgcgcgcgcgcacacacacacacacacacacacacacacacacacccctatttctgcatgcgcggtcacagagctcaggcacaccatacaaggcgggaaaattggctttaaaaaagtattcctcagtcctaaggagccctaaagagagttgtggaggtaaccatcacagtcttgaaatagacgtctagggccccttacacccgatccgactaagcgctgcaggagtccactggcccgttataaccgtgatccctcttgccgcccagcttccctccgttagggatttccacgtcttctaattttatcctgcctctgtctttagaggagctctggtttcccgcactatttcagggcccaggctaacgtttagggatgttttccagcccctcagccggcccctcctctccgcccacccattctcagcaagaaacttgaggctaaagctaatctcccgaagggtcagcggaattcttcaggggtcccccagcccccggggtttgtggaattagcgcgacaggggaggtcggagggtgtgcggtttgggattcagcgtggaacagtcaggtgtaggagccaatccgtgtaggggatcccagctccaccccagggattcagagaattggggccaagcaggagagagactgttcaaaccacaggcaacttctcaaagtcccatgtgacactccatgaatctccaaacagacatgggttcccaaaataatacattctaaagatggttaaaagaaagaaatagaagatttggagccaatcaatactcctttgtatgccaaaacttctaagaaatggtggtgtgacaatcattttggattgtattagaaaatcagtgtcctaggtaagaaaatataacttgcacttttcctgagaatccttccctgtatttccaagaaaacaacttttgctggatggggagggggaagaagcatgtttcatttaaagttaaagaattttatgtaatgagagcatgtttcatttaaagttacagaaaccatatcatatttcctaaatatttgaggggtgcttgtcagtaaatactaaatagggcttcagaggagaaaaagcataaaatcaaatgtacactagattctcaatgtgacaggagagaaattagaattctgcagccattttaatggatgaaatgtcttgtgtttcgcaaaccacgtaaagtcattgtacatataatgcacctgaaaaaccgaagaattactctattttttatcttcatctttgcatattagttagagcagaagagggatgcatttctgaattctaagatgttaatccttattacatccaataatacttttacccatatgctttgatttatcttctcttggtctccagccagcttggctcctaaccattctgttgttagcctcctaagaacctggttttaattttgtttggtctttgataatcagaaaaacctattagttaaaagccatttcataagagagtttctgacattttaaagaggtattaagagcctcgtttttgggtatccctggtccccaaaagaggatcaccaaaaatagccaacatgcggttccagtccatgaacttatatagccagcgtagcctagagggaagctgagtctctgagatgcaatccaggagtgctttggaatgcaatcctgactgcctgggcttatttaaagaggaaatcacttaattcgattgcagtaggcaccctcttgaacactacttttttgtttttttctttgagacggaatctcgctctgtcgcccaggctggagtgcagtggcgcgatctcggctcactgcaagctccgcctcccgggttcactccattctcctgcctcagcctcctgagtagctgggactacaggtgctcgccaccttacccagctaattttttgcatttttagtagagacggggtttcaccgtgttagccaggatggtctcgatctcctgaccttgtgatccacccgcctcagcctcccaaagtgctgggattacaggtgtgattgaacactactttattgaaactttatagagactatatcaaatgcccatggatatggtgatttttttcagtgatttttatttgattttaattaacacagctggaagaaaagatgtacctagcaatttcatttgaaaatagaatcactgcctcattaaaaattaattttaaaaaatcttcaaaagttcaaattatttagtgaaaaagtatcaaagcatgacagagccagttttgtgttttagtattgtagttacttttatatgattatctgaatgccaatattttatttgactatccctaacactaaaggataaggttcatatttgtttaatgttttcaggatagagcctacccctgagccacttgtaggaatctgacatagtttaccacacttttacatggatgtttggtttctgcaagttctttctctttaccagttattctggaaccattctgggagtttgcttttcaaagctgtcttatggcatatcttctttaggttgttatacctgccctaatttaggtgtttttaaaaaaatacctacatacacatacacacatatatatacacacacatttatatacatatatgtatgtatacatacatacatatccatatgtatatatgtgtgtatatatacgtatacatacatatatatatatttatgtatatagatgcagagctcacctgttctttcccagggacacgtaaaaggttttcgtttcagcatctccagcttcccaaatggctaagtcgccttgagatggacaatggtggaaacttactgagctttccacctcaaatttgaaagtccccctcccaagtgctctttagcagaaacatgttctccaaccaggccccttgaaagaatgtacttctcttaaagattttcaattactgcttaaatagtaattataagcatgtggacaaggtagaatttttaaacacatttttggtctattcagctcttaagtgctacatacttgctgcttacagacttgcagaatattaggagcagaatggaagggccttttttagataacgctaaagcctagaggaaattatggtgctcatccaaagttgcatggctcattagtagtaacaccatctggattctagccctcctagagaaatctaggggttctattaataagaggcactgtagtgtgctgattaagggcgtggcctctgtgaccagactgcaaaaattcaaactctagttttactgcttatcagctatgtaaacatagataagttacttttacctaagttttctcatctgtaaaataggaatgtaaaagactatctcttatggttggcataaggattaaaatgacaaacaaaatgattagaacagtatctgatacatagtgaatgcccaataagcttagtcatcattattatacattgttgcctttcaaaggtagttttctaaaaactctgcaaagtttacaaatatctgagaacatttggtgtattaaaatgtattctgcaggccaggtgtggtggctcatgcctgtaatcccagcattttgggaggctgaggcaggcggatcttgaggtcaggagttcaagaccaacctggccaacatggtgaaaccccgtgtctaaaaaaaaaatacaatagttagctgggcgcagtggtgtgcacctgtagtcccagctactccggaagctgaggcaggagaatcgcttgaacctgggaagcgaaggttgccgtgagtcgagatcgcactactgcaatccagcctgggtgacagagtgagactctgtctcaaaaaaaaaaaaaaatgtattctgcaataacatcactatcctagaattttgctgaaaaatgcatgttggtaaaggctaaatggagcgaactaggtctactgaatttcacaggtttattattttaggaacttggtggtggcaaaaagagagaaccaggttgggttctgaattcttggaaattatagaattattgtctgaagttaactgatagtgattcaacttttttaaaaaaaagcagtaacaaagaaaatatgcaaattggaaggggaggtagttatggcttttattattttgtgggtttggactagttggctcttctatttgcgtgctttctcttcatttagatgcttcattggataagacaattggctttcctttttctcattttctttgctctgcagagattacagtggaagcttcttaagtcgtaatgtagggtttcacatagctttcaattgtaataattaaaattcttatgttaaataactaatgccagaataattctgaattaatttatattttctttaatattcttcttattttcttgctactctaggttgtgaaacagctattttattcccaatgcgttccaagaagatttttggaagcgtgcatccagtgagaccaatgaggcttgagtcttttagtgcctgcatttgggtcaaagccacagatgtattaaacaaaaccatcctgttttcctatggcacaaagaggaatccatatgaaatccagctgtatctcagctaccaatccatagtgtttgtggtgggtggagaggagaacaaactggttgctgaagccatggtttccctgggaaggtggacccacctgtgcggcacctggaattcagaggaagggctcacatccttgtgggtaaatggtgaactggcggctaccactgttgagatggccacaggtcacattgttcctgagggaggaatcctgcagattggccaagaaaagaatggctgctgtgtgggtggtggctttgatgaaacattagccttctctgggagactcacaggcttcaatatctgggatagtgttcttagcaatgaagagataagagagaccggaggagcagagtcttgtcacatccgggggaatattgttgggtggggagtcacagagatccagccacatggaggagctcagtatgtttcataaatgttgtgaaactccacttgaagccaaagaaagaaactcacacttaaaacacatgccagttgggaaggtctgaaaactcagtgcataataggaacacttgagactaatgaaagagagagttgagaccaatctttatttgtactggccaaatactgaataaacagttgaaggaaagacattggaaaaagcttttgaggataatgttactagactttatgccatggtgctttcagtttaatgctgtgtctctgtcagataaactctcaaataattaaaaaggactgtattgttgaacagagggacaattgttttacttttctttggttaattttgttttggccagagatgaattttacattggaagaataacaaaataagatttgttgtccattgttcattgttattggtatgtaccttattacaaaaaaaagatgaaaacatatttatactacaaggtgacttaacaactataaatgtagtttatgtgttataatcgaatgtcacgtttttgagaagatagtcatataagttatattgcaaaagggatttgtattaatttaagactatttttgtaaagctctactgtaaataaaatattttataaaactagctcacgtcatttaattataaatttaagagatgttttggagcaaa

SEQ ID NO: 24 - DNA, 1890 bp, Homo sapiens
agaaggacgcaggcagcaaagagtagtcagtcccttcttggctctgctgacactcgagcccacattccatcacctgctcccaatcatgcaggtctccactgctgcccttgccgtcctcctctgcaccatggctctctgcaaccaggtcctctctgcaccacgtgagtccatgttgttgttgtgggtatcaccactctctggccatggttagaccacatcagtctttttttgtggcctgagagccccgaagagaaaagaaggaagttcttaaagcgctgccaaacaccttggtctttttcttcacaacttttatttttatctctagaaggggtcttagccctcctagtctccaggtatgagaatctaggcaggggcaggggagttacagtcccttgtacagatagaaaaacagggttcaaaacgaatcagtttgcaagaggcagaatccagggctgcttacttcccagtggggtctgttcttcactctccagctcaccctaggtctcccaggagccctgtcccttggatgtcttatgagagatgtccagggcttctcttgggctggggtatgacttcttgaaccgacaaaattccatgaagagagctaagagaacagtccattcaggtatctggatcacatagagaaacagagaacccactatgaagagtcaaggggaaagaggaatatagacagaaacaaagagacatttctctgcaaaaccccccaaatgccttgcagtcacttggtctgagcaagcctgccctcctcaaccactcagggatcagaagctgcctggccttttcttctgagctgtgactcgggcttattctctcctttctccgcagttgctgctgacacgccgaccgcctgctgcttcagctacacctcccgacagattccacagaatttcatagctgactactttgagacgagcagccagtgctccaagcccagtgtcatgtaagtgccagtcttcctgctcacctctagggaggtagggagtgtcagggtgggggcagaaacaggccagaaggccatcctggaaaggcccagccttcaggagcctatcggggatacaggacgcagggcactgaggtgtgacctgacttggggctggagtgaggtgggtgttacagagtcaggaagggctgccccaggccagaggaaagggacaggaagaaggaggcagcaggacactctgagggcccccttgcctggagtcactgagagaagctctctagacggagataggcagggggcccctgagagaggagcaggccttgagctgcccaggacagagagcaggatgtcagggccatggtgggcccaggattccccggctggattccccagtgcttaactcttcctcccttctccacagcttcctaaccaagagaggccggcaggtctgtgctgaccccagtgaggagtgggtccagaaatacgtcagtgacctggagctgagtgcctgaggggtccagaagcttcgaggcccagcgacctcagtgggcccagtggggaggagcaggagcctgagccttgggaacatgcgtgtgacctccacagctacctcttctatggactggttattgccaaacagccacactgtgggactcttcttaacttaaattttaatttatttatactatttagtttttataatttatttttgatttcacagtgtgtttgtgattgtttgctctgagagttccccctgtcccctccaccttccctcacagtgtgtctggtgacaaccgagtggctgtcatcggcctgtgtaggcagtcatggcaccaaagccaccagactgacaaatgtgtatcagatgcttttgttcagggctgtgatcggcctggggaaataataaagatgttcttttaaacggtaaa

SEQ ID NO: 25 - DNA, 7066 bp, Homo sapiens
gaaagccataaaaacagcgagggagaaactggcagataccaaacctcttcgaggcacaaggcacaacaggctgctctgggattctcttcagccaatcttcattgctcaagtatgactttaatcttccttacaactaggtgctaagggagtctctctgtctctctgcctctttgtgtgtatgcatattctctctctctctctctttctttctctgtctctccctctccttccctctctgcctccctctctcagctttttgcaaaaatgccaggtgtaatataatgcttatgactcgggaaatattctgggaatggatactgcttatctaacagctgacaccctaaaggttagtgtcaaagcctctgctccagctctcctagccaatacattgctagttggggtttggtttagcaaatgcttttctctagacccaaaggacttctctttcacacattcattcatttactcagagatcatttctttgcatgactgccatgcactggatgctgagagaaatcacacatgaacgtagccgtcatggggaagtcactcattttctcctttttacacaggtgtctgaagcagccatggcagaagtacctgagctcgccagtgaaatgatggcttattacaggtcagtggagacgctgagaccagtaacatgagcaggtctcctctttcaagagtagagtgttatctgtgcttggagaccagatttttcccctaaattgcctctttcagtggcaaacagggtgccaagtaaatctgatttaaagactactttcccattacaagtccctccagccttgggacctggaggctatccagatgtgttgttgcaagggcttcctgcagaggcaaatggggagaaaagactccaagcccacaatacaaggaatccctttgcaaagtgtggcttggagggagagggagagctcagattttagctgactctgctgggctagaggttaggcctcaagatccaacagggagcacccagggtgcccacctgccaggcctagaatctgccttctggactgttctgcgcatatcactgtgaaacttgccaggtgtttcaggcagctttgagaggcaggctgtttgcagtttcttatgaacagtcaagtcttgtacacagggaaggaaaaataaacctgtttagaagacataattgagacatgtccctgtttttattacagtggcaatgaggatgacttgttctttgaagctgatggccctaaacagatgaaggtaagactatgggtttaactcccaacccaaggaagggctctaacacagggaaagctcaaagaagggagttctgggccactttgatgccatggtattttgttttagaaagactttaacctcttccagtgagacacaggctgcaccacttgctgacctggccacttggtcatcatatcaccacagtcactcactaacgttggtggtggtggccacacttggtggtgacaggggaggagtagtgataatgtttcccatttcatagtaggaagacaaccaagtcttcaacataaatttgattatccttttaagagatggattcagcctatgccaatcacttgagttaaactctgaaaccaagagatgatcttgagaactaacatatgtctaccccttttgagtagaatagttttttgctacctggggtgaagcttataacaacaagacatagatgatataaacaaaaagatgaattgagacttgaaagaaaaccattcacttgctgtttgaccttgacaagtcattttacccgctttggacctcatctgaaaaataaagggctgagctggatgatctctgagattccagcatcctgcaacctccagttctgaaatattttcagttgtagctaagggcatttgggcagcaaatggtcatttttcagactcatccttacaaagagccatgttatattcctgctgtcccttctgttttatatgatgctcagtagccttcctaggtggcccagccatcagcctagctaggtcagttgtgcaggttgggaggcagccacttttctctggctttattttattccagtttgtgatagcctcccctagcctcataatccagtcctcaatcttgttaaaaacatatttctttagaagttttaagactggcataacttgttggctgcagctgtgggaggagcccattggcttgtctgcctggcctttgcccccattgcctcttccagcagcttggctctgctccaggcaggaaattctctcctgctcaactttcttttgtgcacttacaggtctctttaactgtctttcaagcctttgaaccattatcatgccttaaggcaacctcagtgaagccttaatacggagcttctctgaataagaggaaagtggtaacatttcacaaaaagtactctcacaggatttgcagaatgcctatgagacagtgttatgaaaaaggaaaaaaaagaacagtgtagaaaaattgaatacttgctgagtgagcataggtgaatggaaaatgttatggtcatctgcatgaaaaagcaaatcatagtgtgacagcattagggatacaaaaagatatagagaaggtatacatgtatggtgtaggtggggcatgtacaaaaaagatgaacaaagtagaaatgggatttattctaaaagaatagcctgtaaggtgtcagaaagcccacattctagtcttgagtctgcctctaacctgctgtgtgcccttgagtacacacttaacctccttgagcttcagagagggataatctttttattttattttattttattttgttttgttttgttttgttttgttttatgagacagagtctcactctgttgcccaggctggagtgcagtggtacaatcttggcttactgcatcctccacctcctgagttcaagcgattctccttcctcagtctcctgaatagctaggattacaggtgcaccccaccacacccagctaatttttgtatttttagtagagaaggggtttcgccatgttggccaggctggttttgaagtcctgacctaaatgattcatccacctcggcttcccaaagtgctgggattacaggcatgagccaccacgcctggcccagagagggatgatctttagaagctcgggattctttcaagccctttcctcctctctgagctttctactctctgatgtcaaagcatggttcctggcaggaccacctcaccaggctccctccctcgctctctccgcagtgctccttccaggacctggacctctgccctctggatggcggcatccagctacgaatctccgaccaccactacagcaagggcttcaggcaggccgcgtcagttgttgtggccatggacaagctgaggaagatgctggttccctgcccacagaccttccaggagaatgacctgagcaccttctttcccttcatctttgaagaaggtagttagccaagagcaggcagtagatctccacttgtgtcctcttggaagtcatcaagccccagccaactcaattcccccagagccaaagccctttaaaggtagaaggcccagcggggagacaaaacaaagaaggctggaaaccaaagcaatcatctctttagtggaaactattcttaaagaagatcttgatggctactgacatttgcaactccctcactctttctcaggggcctttcacttacattgtcaccagaggttcgtaacctccctgtgggctagtgttatgaccatcaccattttacctaagtagctctgttgctcggccacagtgagcagtaatagacctgaagctggaacccatgtctaatagtgtcaggtccagtgttcttagccaccccactcccagcttcatccctactggtgttgtcatcagactttgaccgtatatgctcaggtgtcctccaagaaatcaaattttgccgcctcgcctcacgaggcctgcccttctgattttatacctaaacaacatgtgctccacatttcagaacctatcttcttcgacacatgggataacgaggcttatgtgcacgatgcacctgtacgatcactgaactgcacgctccgggactcacagcaaaaaagcttggtgatgtctggtccatatgaactgaaagctctccacctccagggacaggatatggagcaacaaggtaaatggaaacatcctggtttccctgcctggcctcctggcagcttgctaattctccatgttttaaacaaagtagaaagttaatttaaggcaaatgatcaacacaagtgaaaaaaaatattaaaaaggaatatacaaactttggtcctagaaatggcacatttgattgcactggccagtgcatttgttaacaggagtgtgaccctgagaaattagacggctcaagcactcccaggaccatgtccacccaagtctcttgggcatagtgcaatgtcaattcttccacaatatggggtcatttgatggacatggcctaactgcctgtgggttctctcttcctgttgttgaggctgaaacaagagtgctggagcgataatgtgtccatccccctccccagtcttccccccttgccccaacatccgtcccacccaatgccaggtggttccttgtagggaaattttaccgcccagcaggaacttatatctctccgctgtaacgggcaaaagtttcaagtgcggtgaacccatcattagctgtggtgatctgcctggcatcgtgccacagtagccaaagcctctgcacaggagtgtgggcaactaaggctgctgactttgaaggacagcctcactcagggggaagctatttgctctcagccaggccaagaaaatcctgtttctttggaatcgggtagtaagagtgatcccagggcctccaattgacactgctgtgactgaggaagatcaaaatgagtgtctctctttggagccactttcccagctcagcctctcctctcccagtttcttcccatgggctactctctgttcctgaaacagttctggtgcctgatttctggcagaagtacagcttcacctctttcctttccttccacattgatcaagttgttccgctcctgtggatgggcacattgccagccagtgacacaatggcttccttccttccttccttcagcatttaaaatgtagaccctctttcattctccgttcctactgctatgaggctctgagaaaccctcaggcctttgaggggaaaccctaaatcaacaaaatgaccctgctattgtctgtgagaagtcaagttatcctgtgtcttaggccaaggaacctcactgtgggttcccacagaggctaccaaattacatgtatcctactcatggggcctaggggttggggtgaccctgcactgctgtgtccctaaccacaagacccccttctttcttcagtggtgttctccatgtcctttgtacaaggagaagaaagtaatgacaaaatacctgtggccttgggcctcaaggaaaagaatctgtacctgtcctgcgtgttgaaagatgataagcccactctacagctggaggtaagtgaatgctatggaatgaagcccttctcagcctcctgctaccacttattcccagacaaccaccttctccccgcccccatccctaggaaaagctgggaacaggtctatttgacaattttgcattaatgtaaataaatttaacataatttttaactgcgtgcaaccttcaatcctgctgcagaaaattaaatcattttgccgatgttattatgtcctaccatagttacaaccccaacagattatatattgttagggctgctctcatttgatagacaccttgggaaatagatgacttaaagggtcccattatcatgtccactccactcccaaaattaccaccactatcacctccagctttctcagcaaaagcttcatttccaagttgatgtcattctaggaccataaggaaaaatacaataaaaagcccctggaaactaggtacttcaagaagctctagcttaattttcacccccccaaaaaaaaaaaattctcacctacattatgctcctcagcatttggcactaagttttagaaaagaagaagggctcttttaataatcacacggaaagttgggggcccagttacaactcaggagtctggctcctgatcatgtgacctgctcgtcagtttcctttctggccaacccaaagaacatctttcccatagcatctttgtcccttgccccacaaaaattcttctttctctttcgctgcagagtgtagatcccaaaaattacccaaagaagaagatggaaaagcgatttgtcttcaacaagatagaaatcaataacaagctggaatttgagtctgcccagttccccaactggtacatcagcacctctcaagcagaaaacatgcccgtcttcctgggagggaccaaaggcggccaggatataactgacttcaccatgcaatttgtgtcttcctaaagagagctgtacccagagagtcctgtgctgaatgtggactcaatccctagggctggcagaaagggaacagaaaggtttttgagtacggctatagcctggactttcctgttgtctacaccaatgcccaactgcctgccttagggtagtgctaagaggatctcctgtccatcagccaggacagtcagctctctcctttcagggccaatccccagcccttttgttgagccaggcctctctcacctctcctactcacttaaagcccgcctgacagaaaccacggccacatttggttctaagaaaccctctgtcattcgctcccacattctgatgagcaaccgcttccctatttatttatttatttgtttgtttgttttattcattggtctaatttattcaaagggggcaagaagtagcagtgtctgtaaaagagcctagtttttaatagctatggaatcaattcaatttggactggtgtgctctctttaaatcaagtcctttaattaagactgaaaatatataagctcagattatttaaatgggaatatttataaatgagcaaatatcatactgttcaatggttctgaaataaacttcactgaagaaaaaaaaa

SEQ ID NO: 26 - DNA, 1795 bp, Homo sapiens
agcacaggacacagctgggttctgaagcttctgagttctgcagcctcacctctgagaaaacctcttttccaccaataccatgaagctctgcgtgactgtcctgtctctcctcatgctagtagctgccttctgctctccagcgctctcagcaccaagtaagtctacttttgcagctgctatttcgagtcaaggtgtaggcagagtccttttttctagtcatggctggcaaacagtgggatctggggatgggacaaaaggcagctaggaagattgccatgtagtctgctgctaaatgtagagtctagtagatattcaataacattcaagttcctattttcttaagaattagcaaccagcagaggaaaacgatgggctggaagtcagactgttgaattggctctgcctttaattatttgttcaagcaagcccctgtccctctctgtgccttggtttccccatctgtcatatgaagggagtgcgatgtgttctgagactgaatccagttccaatcttctagatttctttctcgttcttctctgaagatccactattcaaaataagactcctgctcatgttaggtgggaatggatatttggggttctggtagctccacagggatgctcaatgaagatacaaaattagaagtcaaaataaacagctcccacgggcagtgttgatctcaccctggcctttcctttcagtgggctcagaccctcccaccgcctgctgcttttcttacaccgcgaggaagcttcctcgcaactttgtggtagattactatgagaccagcagcctctgctcccagccagctgtggtgtgagtatcaacccctgggctgccctgggaggcaagggtgagggctggattttaaaagagggcctgttttggggagggggtgattgagcattggggaggcagctcccagggctgaagccttccctgagagcagtgaggacacaggtcatgaactcacttttcaagtgctgaaggcggcagagtgggagccgagagagaagggggttgctggggaggaagttattcagaggacagggaagcaggggaaggcagacaggtcccatgagatatggaccgattccttaaaccgtgctagaaagacatgtggaaaagtcactgccaggctggcagggaatggggagatctattcatattgattgcaatgccccttggttcctaatctgggcaactcctggggcccacagctaaatccagtgggtggaagttacagggagtctgcttccagtgctgctccaggaaggatcccatccaccagagctgccccacatggaccatggtcaggcagaggaagatgcaaaggataaagccagatgacctcaaaggtctcatgagattctaatctgtccgctccttgttctacagattccaaaccaaaagaagcaagcaagtctgtgctgatcccagtgaatcctgggtccaggagtacgtgtatgacctggaactgaactgagctgctcagagacaggaagtcttcagggaaggtcacctgagcccggatgcttctccatgagacacatctcctccatactcaggactcctctccgcagttcctgtcccttctcttaatttaatcttttttatgtgccgtgttattgtattaggtgtcatttccattatttatattagtttagccaaaggataagtgtcccctatggggatggtccactgtcactgtttctctgctgttgcaaatacatggataacacatttgattctgtgtgttttcataataaaactttaaaataaaatgcagacagtt

SEQ ID NO: 27 - DNA, 3175 bp, Homo sapiens
aaaaagccaccggagcactccataaggcacaaactttcagagacagcagagcacacaagcttctaggacaagagccaggaagaaaccaccggaaggaaccatctcactgtgtgtaaacatgacttccaagctggccgtggctctcttggcagccttcctgatttctgcagctctgtgtgaaggtaagcacatctttctgacctacagcgttttcctatgtctaaatgtgatccttagatagcaaagctattcttgatgctttggtaacaaacatcctttttattcagaaacagaatataatcttagcagtcaattaatgttaaattgaagatttagaaaaaactatatataacacttaggaaagtataaagtttgatcaatatagatattctgcttttataatttataccatgtagcatgcatatatttaacgtaaataagtaatttatagtatgtcctattgagaaccacggttacctatattatgtattaatattgagttgagcaaggtaactcagacaattccactccttgtagtatttcattgacaagcctcagatttgtcattaattcctgtctggtttaaagataccctgattatagaccaggcatgtataacttatttatatatttctgttaattctttctgaaggcaatttctatgctggagagtcttagcttgcctactataaataacactgtggtatcacagaggattatgcaatattgaccagataaaaataccatgaagatgttgatattgtacaaaaagaactctaactctttatataggaagtcgttcaatgttgtcagttatgactgttttttaaaacaaagaactaactgaggtcaagggctaggagaatattcaggaatgagttcactagaaacatgatgccttccatagtctccaaataatcatattggaattagaaaggaagtagctggcagagctgtgcctgttgataaaatcaatccttaatcactttttcccccaacaggtgcagttttgccaaggagtgctaaagaacttagatgtcagtgcataaagacatactccaaacctttccaccccaaatttatcaaagaactgagagtgattgagagtggaccacactgcgccaacacagaaattatgtaagtactttaaaaaagattagatattttgttttagcaaacttaaaattaaggaaggtggaaatatttaggaaagttccaggtgttaggattacagtagtaaatgaaacaaaacaaaataaaaatatttgtctacatgacatttaaatatggtagcttccacaactactataaatgttattttggacttagactttatgcctgacttaaggaatcatgatttgaatgcaaaaactaaatattaatctgaaccatttctttcttatttcagtgtaaagctttctgatggaagagagctctgtctggaccccaaggaaaactgggtgcagagggttgtggagaagtttttgaagaggtaagttatatattttttaatttaaatttttcatttatcctgagacatataatccaaagtcagcctataaatttctttctgttgctaaaaatcgtcattaggtatctgcctttttggttaaaaaaaaaaggaatagcatcaatagtgagtttgttgtactcatgaccagaaagaccatacatagtttgcccaggaaattctgggtttaagcttgtgtcctatactcttagtaaagttctttgtcactcccagtagtgtcctattttagatgataatttctttgatctccctatttatagttgagaatatagagcatttctaacacatgaatgtcaaagactatattgacttttcaagaaccctactttccttcttattaaacatagctcatctttatatttttaattttattttagggctgagaattcataaaaaaattcattctctgtggtatccaagaatcagtgaagatgccagtgaaacttcaagcaaatctacttcaacacttcatgtattgtgtgggtctgttgtagggttgccagatgcaatacaagattcctggttaaatttgaatttcagtaaacaatgaatagtttttcattgtaccatgaaatatccagaacatacttatatgtaaagtattatttatttgaatctacaaaaaacaacaaataatttttaaatataaggattttcctagatattgcacgggagaatatacaaatagcaaaattgaggccaagggccaagagaatatccgaactttaatttcaggaattgaatgggtttgctagaatgtgatatttgaagcatcacataaaaatgatgggacaataaattttgccataaagtcaaatttagctggaaatcctggatttttttctgttaaatctggcaaccctagtctgctagccaggatccacaagtccttgttccactgtgccttggtttctcctttatttctaagtggaaaaagtattagccaccatcttacctcacagtgatgttgtgaggacatgtggaagcactttaagttttttcatcataacataaattattttcaagtgtaacttattaacctatttattatttatgtatttatttaagcatcaaatatttgtgcaagaatttggaaaaatagaagatgaatcattgattgaatagttataaagatgttatagtaaatttattttattttagatattaaatgatgttttattagataaatttcaatcagggtttttagattaaacaaacaaacaattgggtacccagttaaattttcatttcagataaacaacaaataattttttagtataagtacattattgtttatctgaaattttaattgaactaacaatcctagtttgatactcccagtcttgtcattgccagctgtgttggtagtgctgtgttgaattacggaataatgagttagaactattaaaacagccaaaactccacagtcaatattagtaatttcttgctggttgaaacttgtttattatgtacaaatagattcttataatattatttaaatgactgcatttttaaatacaaggctttatatttttaactttaagatgtttttatgtgctctccaaattttttttactgtttctgattgtatggaaatataaaagtaaatatgaaacatttaaaatataatttgttgtcaaagta

SEQ ID NO: 28 - DNA, 2219 bp, Homo sapiens
gtcgccttccttcgggactccggatcgatctggagctccgggaatttccctggcccggccgctccgggctttccagtctcaaccatgcataaaaagggttcgccgatcttggggagccacacagcccgggtcgcaggcacctccccgccagctctcccgcttctcgcacagcttcccgacgcgtctgctgagccccatggcccacgccacgctctccgccgcccccagcaatccccggctcctgcgggtggcgctgctgctcctgctcctggtggccgccagccggcgcgcagcaggtgggtcccggcgccctggggtccccgggccggacgcggctggggtgggcgccccgcgccgacagccccgctcaatcagcgagtctattcttccctaggagcgtccgtggtcactgaactgcgctgccagtgcttgcagacactgcagggaattcacctcaagaacatccaaagtgtgaatgtaaggtcccccggaccccactgcgcccaaaccgaagtcatgtaagtcccgccccgcgcttccgctgccaccgctggggtccccgactctcccgctgccccaaccctgtccccagcccgacctcctgtctcacggaattcccttctctctgcagagccacactcaagaatgggaagaaagcttgtctcaaccccgcatcccccatggttcagaaaatcatcgaaaagatactgaacaagtgagttgtaatttccatatacacaggcgactggagccgttggtcagaaatactggcatctgccccctaaaaataaaatcagggaaccccaagagttagctgaaggactagaaattgtgattattattttcacaattaaagttgccattaaggttattaatctgctctggtgccagaggatatttcagtatttcagtgtcttccatttccaggcctaacccctgggagggtaaatgtgggtttctagaatactaagtaaatttgactaacaatgccaaaatgccccctgcctgttttgggacgtttacctcagtccctaatgggcttcagacctgaaaaatgcaatgtctggtttgggcactttgggcctgtaagccttcttggtgaagagcagaaactttgcagtaacaccttcagtgagttcaaggctaggatccctgtcaacgttatttaatctctttgagctttagcaaaatagggtagataatggtagttatttcatagggttgtgtgcagcttaagggagatcatgaatggacatttctaacccaatgtgacaatcagtgaccaatatgttttggctttttcaaaccaagaatctagttgagtccacagccacttctttcttgaaaaaaaaaaaaaaagcattcaggagtgcaagttttctgctatagaaggcagtgggtacagacagaccttccctgagtggagggctgggagagagtctgcatggggacatccctccaagcaacttcagagtgacagaagagcagccttccttagcacctgcaacagtaacccttttctcatcacagggggagcaccaactgacaggagagaagtaagaagcttatcagcgtatcattgacacttcctgcagggtggtccctgcccttaccagagctgaaaatgaaaaagagaacagcagctttctagggacagctggaaaggacttaatgtgtttgactatttcttacgagggttctacttatttatgtatttatttttgaaagcttgtattttaatattttacatgctgttatttaaagatgtgagtgtgtttcatcaaacatagctcagtcctgattatttaattggaatatgatgggttttaaatgtgtcattaaactaatatttagtgggagaccataatgtgtcagccaccttgataaatgacagggtggggaactggagggtggggggattgaaatgcaagcaattagtggatcactgttagggtaagggaatgtatgtacacatctattttttatactttttttttaaaaaaagaatgtcagttgttatttattcaaattatctcacattatgtgttcaacatttttatgctgaagtttcccttagacattttatgtcttgcttgtagggcataatgccttgtttaatgtccattctgcagcgtttctctttcccttggaaaagagaatttatcattactgttacatttgtacaaatgacatgataataaaagttttatgaaaaaaaa

SEQ ID NO: 29 - DNA, 71529 bp, Homo sapiens
cggccccagaaaacccgagcgagtagggggcggcgcgcaggagggaggagaactgggggcgcgggaggctggtgggtgtggggggtggagatgtagaagatgtgacgccgcggcccggcgggtgccagattagcggacgcggtgcccgcggttgcaacgggatcccgggcgctgcagcttgggaggcggctctccccaggcggcgtccgcggagacacccatccgtgaaccccaggtcccgggccgccggctcgccgcgcaccaggggccggcggacagaagagcggccgagcggctcgaggctgggggaccgcgggcgcggccgcgcgctgccgggcgggaggctggggggccggggccggggccgtgccccggagcgggtcggaggccggggccggggccgggggacggcggctccccgcgcggctccagcggctcggggatcccggccgggccccgcagggaccatggcagccgggagcatcaccacgctgcccgccttgcccgaggatggcggcagcggcgccttcccgcccggccacttcaaggaccccaagcggctgtactgcaaaaacgggggcttcttcctgcgcatccaccccgacggccgagttgacggggtccgggagaagagcgaccctcacagtgagtgccgacccgctctctccgcctcatttccatttcgtgggttctcgcccgctctctcccctccagcctgcaccctcctcccggatcttcactgcgaccctagcgctccgtgtggtttctggccgcgcggccctcggcggtttcgggttcaccactcaccccctcctttccgggctgcggcgtaggcccgggtgtcccctgggctttggggtgtgccaatttgccctgtaaaccagtacccccggcccggagccgcggcgcgccggggcctcgcggactggctgtcttcccgcggacaacctgtcgcgtcggggatgcccgcggccccgccatgcagctctggccgcttctatctgctgcgtgctgtcccggggacaaagacaggaaggaccgcagcagaacgaaacggtctttactggaaaaacacctttctagagtcctgcccttaaattccgactcgggacgacccgaggcatatggcacactactctcacccactctgttttatatttttccgaattgacgaaagctgaaagagcaaaaacaaaaaccaaccagccaaccagcaaaaaatccagatgttgttaataaagtgccatagctttgtttcagtagtgaaaagaagtgcaaacactttaatcttccacctgcagtgactagctttgagaccttgagccgacgcttaaccccagagccggtttcctcatcgctcacgtggggctaatatattactaccttgcagcaggcttgaggatgaaatgagaattgcagttttgctttctgtaagaaacaatgtttgtggttctagaaagaacactggcctaaataaggagtgcttggactttaggggattccctaagtctggagtgggggctgaagatttgcatttctaacatgttccccggggatgctgatcacatcacactttgagagccactggtctagaggaaagagaaagaaaggggcataagatgagccgatttacaacactgatggaatttgaagtgagagaaagaggactagaatatattgtaacctgtcctcctgtaagtgtatgtaaacatgtgttttaaaagctgtgtgttatggcgttccttcctttatgggttccaggtggagaatctgattctctcattgcctgagaaaagacccacaggggtcccagcgccactcccctgtagttctgcctttgtcttgggatgctaatgggatgtcatgaggggaggtggaggggggctggaagagaagaaaattctacaaccaaacgtgaattggcagaagaatgggcaatacactttcatatgagctgagtctttattgcttccaaaatagcaacctgcaagagaggcaagtatttaatttttttcaggcttgccataatttaaaaattttatcaatcacttaatcccgtaaaactgaaaagatgcttgtaacctattagatgggttagtgctagttctctattctggtaacttgaactcatctatttcaaaaaattatctttgtgattgaagtttgttctgcagttgtctgctacgccatctcagctgacaagggcaaggtgctgtgtgtcccaattggttttgttctttctagtatcacaaattatttattaaaaagcatgtattatgaccagaagacagaagaatttccctttaaattaaattaatatttggggcttcccctaatactctttttttttcagactctattagttgctgaatcattttttctttgaagattttgatacccgattcgccttagaataaaactatgtagaggttagccagtggacataattttgaattgcataccacattaccaccgttgtaaaaacaaccgttaactttttcttcctaactgtgagttgggttttcatttttgtaatcttactttaactctgtggttctcaaatggggacgattttgcctcccaggggacatttgacaatgcctggagacatttttggttgctgtaacctggaagggtgctactggcatctggcaggtagaggccggggatgctgctgaacatcctacaatacacattataataccctcaacaaaaacatttttgaccccaaatgtcactagtactcaggttgagaactctgctaactttataactagctaaggacaagacattaaaagggaaatgtagaataactcatccagacttgtggagactaccaatttttttaaaattttttatttctatagggttttagggaccaggtggtagttggttacatgagtaagttctttagtggtgatttgtgaaattttgttgcacccatcacccaagcagtatacactgaatccagtttgtagtcctgtccctccccaacttcccaccctttcttcccaagtccccaaagagactactctttttttaaaggatacctgtaccaggcaatagactgacaagaatacaaatctaaaaatgacaaatttcatctatttctatgtagcccaacctggacataaatttaagtacagtatattattttctcacatattggatgtttactgatagttgaccaaaccatgaggagaccccccaaaacaaataaaactgaccagaaaacatggagaagagttaatagtagccacagtttcctactacattatggctcagatttctagacctgtttgaaaagttgaaaaatctatggtctcattcctcagactgttttgtccaactgacctgaacatctgtcactggaattttttttcctttggcatgacactttgtgcctacatgttttctaaactgcaggtaacttttgaaaggccaagttcaaccattatcagattttaacatttagtatggattaaattgtgagtgcaatttcttccccaaaagctggccagaaggactggagtttggggagggatgctttgaagactgtgatataaatgatggggtcctggagaggtgcaggggaagaggaggcagagtgggaagctgtgaggtaggaaagagaggaaaattttctaaaagaagaggtaggagaagatgacacaacacaaatgtttccaatttttcagtgttgctgaaggtcaactgtgcttcacacctgggcattctcctgaatttgcactcaaaagggcccattttctggcgtttttctcatagtcctggaataatcttcatttgacatgagagtcttgataaaaacaagatgttaaaagtggttagagagtttctccttctccagcatgtgcgctgcactcctgcctttcttttggcatccttaacttttggcaggcctctttcaatgcggtgggaatggataatattaagtatgtactctaaagtagcaagctgtgtaaaaacattcagaagagagaacactttatcccaagcagcacgtacaacatgtggtagagtatagtaagtgaaatgtatgctgcttatgtacacttagtattcaatttattccaggtgctcttatttacaaaaaaaaaaaaaaaaaaaaaaaatgagagtagttagaagtactgtatctacccttgggcttctcccaggaggtgactgcctgtgtgccacacttctttgcttgcaggctccagaggacgctgagacttggaaaggcagacctgcccaccccagtgtggagcaggggtggcttgtaggtgggcctgacccctgggctctttgctactgcatgtgttccatgcaaccccaagcataaaaacatggacttgtgaaatcaaagggaggcttcagaccttctggtttacccatctctttttacagaagaggatactgaagctcagaaaagtcaccaattactcaagttcacttgtgggtttcctctttttttatcctgaatgagcttcttaccacctggtcccttgccttctcttcctgccatccctcagcctcagtgcgctcttcattccaccatagagtgtgccctgctggaccccactttggttaggcttcctccatttcagggtagtgagctgctagcccctttgaagagttcttactagtttacgggtgcctcaggttgatttcctggggttttggataaagccacctttccatctcttcactactgcctttggggtaaatagaaccattgatttaataatacacgtactagattctctccccccacctctctttggtaatatctggcaagtggatagcaataattttacttaatgaacgtgatatttactgtaataaatattgggtgcagtaaacaaatgaagtcagaatctaatagctcatttaatcttggaaatcatgtaatcagtacagcaatgaaaggacaattcatgagtcatagatattaccacaccttaggagccttttaagatgagtttgatgccaagtgacttcagcctagaaaaggcaatatcccctcatgacatgccctgaggggtttcatttgtttataaaatgaccgttatgtaattagactttgacaatggtgtaacaattgggttttaagtattctcattttgatttatgatgccattttatgtggaaggacataattttaaagtttaattagaaaataaaatgttacagatgtaatgaacaaaacaagaacggttctttaaatatcataagcataaaattgactttcttcatctatacactgattctgagaactcatcatcagtgatgttgaaaagacaatttaaggtctcacattattggaactactattttaaaaccacgagatgcctgtacaagctggtaattacacatgtgctgtagtctttgcttgtttttccaattctagtgtttgttgattttccagataccctacttgggcccctatgtcccgtagcacacgtctgtaagaaggctggcatgggataaaagtctatgaccatgaaacggagcaaggcaaatctgtatctttggggcacatatctttttctttttttctttttgagacacagtcttaccctgtcacctaggctggagtgcagtggcacaatctcagctcactacaacctctccttcctgggttcaagcaattcttctgcttcagctgtgattacaagcacctgccaccgcacccagctaatttttgcatttttagtagagacgggatttcaccatgaattttcctggctggtctcgaactccagacctcaggttatctgtccacctcagcctcccaaagtgctgtgattacaggcgtgagccaccgtgcccagcctggggcacaaatcttaacctcatcaggatattctgtccaaacaaatgtattttgttctgttttatttttgagtttgtccttttctgtgctctgaaattaggatctggtctagtacttaatttgtatattgtcagtgctcaataaatagttaatgcttgattgtttgcataataatttggaataatgattatcagtgtagagttttagctggatcattagaaaatgcacttatggcactgtgattttaagtgtttccttgttgtatccactgttcagttagctcctgctttctcttttctccctttaataatgaccgccaacaaggccttttaagctaggttatgtatagccacaggaatttaggagaggaggaaaagaaaagtggcaacttccaggggaactcaccctttgagccatagactgtggttcttagaagccagaccagtctcattctaaacaccttcagaatatttttagtttgaagaaattggaagggcctggaggcaacagacagccaatattcagtgtttatgtctcatccagctgtcttctgtcactcttcctgcacaaggtgacttttgacttgaccggtgtatctttgatacttactcatttacagaaatgtataatggatgtgtgtgtgtgtgtgtgtgtgtatgtgtgtatttgtatttttatagagctattgacttctgcaatttaacctctaagatgaattatccaatagaattctgaaatgaaaagttcacagattttcaaggtattttggagatttaaaaattgaagagaagctatgtgaatattaagtgtatgttccagatataattgaacaattgaaaggaatgatcctggtttaatttataattaagctatacattaatttataatgaaaacttgtaattaaatgataactcaaattagccaagaaaaaagtattttttaaaagaaatttgtacagagtagtaatgatctggctgcattctgtgaacagattattctctgttcataatttaggcaccttaagatgctggcaccttaaggtaggaaccatgacttctttatataaataaacatcataaaaagctcagtactttttactcagagagtgctcactaaatgtcagctgatgaggaaaacattctctgtggaacttgctgtgaaataactactcatgaggcatatgctgtataaagcttggtcaaagtttacagttttcttggtgtcttgacatctgtgtttagatacttggtcaatctttaaatgaagataattatatatagcaaagttatatttgggaaacatttcggaattttggagactggctattagtttttcttagaataatctagagaaagatgaatcatttttcaggaaaaattgtttagaacttttattgggaattctgatttccttaaaagtatttaagatttttatcatgtactattgttgtaggaaaatcctggttcttgtcacacgcccaggaaagattaggctcacagacactttggagggtgaggggttatggaatttattggtcagaaagaaaaaaggaaaaacaacacagcaaagcaataggggttcatattaacaggcccccatctcacagattgattcccaagttaccaccccgaacaggagagaccagtctcctccctgcaaagggcgtgaacttctgtggctccaccccattctcccagtgtgcaggccatttggaggttctccagggacccctttatacttggctgtcctgtctcactatgcaatataaaactttctcaggtatgctgtgcattgtttttcattcttattttcttttgtgaataatatcctggaatcagtacgttcttctacatcatctccttttctttttttgaactcttttaaattctagattctgccctcagtattccacttaaatcattcttatgagagcaccagtagtcttctaatttaatcatgtggccttttccaatttttcatgctactctgacatgtggcagtattgtctgcctctgacttcttgataattccttggcttctattacatcacatcaacctggttctccttttgaaactgcctttgcaaaagttatatctgagaaaattatgacactgccagagatatgacctagcccactcccctcctcttgcctttagctttcaagctgccttaatcatttctgggcttaggcccagataactttgggagatagtttaaaggataataagccttccccaaaactcaactgcctttataaagctaatgaaaggccctcaggcttcaggggaggacaggaatctgagttgtgctaaggtgtagacgtattaatagattgccactagtgcaccaatagtggtgcagataacaccactattgtagattggccttttgagatatcttttcaggttttttgcatgtctgacacccatggctccagctggacctgctaaaccactcctgtggccccacccaggaatggttccactcaagaggacaactttgaccccctattatttcatcttcagcccaatgaattatcagtaagcacccattgcatagcaatcctcaccctttcccccaaactgctgttgaaaaactcctatcccatgagctgtggatgagattggtttgagtactaactctatctcccatgtggctttgccggccttgtgtttattaaactctttctttactgcaatgctgtggtctttccttgtgcagcaggctggaagaactcctcaggcggttatacttttgcccatccaactgtctttttttccactttcttctgttttttttttgcatttgtattcccccaaggttctgtttttagccttctactcttctttctgtgtacttgtattccttcagaagatcatgtattgtctctgtctctgtcttgattccccatctcaatttcccactgcttggagggcagacacactgccatagcttcaacttaacatacataaaacagaacttaacaccattttctcaaactagcaccctttcctcctgaatttctgcttgtagtgaattattattcttgtctccaaagctagacaccatggaattgtctttgatgcctttctctacttctttcgtatatatctctctaaaatgtttcccagccatagtgatttccttgccctgcctcttgatttaatgacctctactctcctgcaattttaagcactaaccagacctacctggctttccttcttaaacatgacctaccttatttcttactgtttaccatccataccttcctgaagctgtagcactctgtgctttaattatagtctctttaatgtgtcataacgattactgtcacaatgattggcctttcttcatgtgactcttgtttttgaaaaatccttctttttcttatcaatttctctctcacaactcctcccatcctcacctttctctggaaaaatcctttaagatccagcccaacagacttctttgtgaaactttcctctaccttcccagggagaattaatggtttttactgttttcccatatacttggtacatagtctgaacacagaacttcatgctttctgtaatagttagtggtttatgtgtctggcttctgcactgggactgtgaactctttgtaggcaagcactggatcccatttgctgcatctatcctcacacacagtggccactcaaagaatgtttgttaaattgaagatgtactcaataaattagccaagtctcttaacttcctttctgaccttcccttcacgtctcctgtcttccttgtcatcttagcctttaaccaggcagttttccttaagctgaaatgtcctgtctgtcctcgtaccttatcccatttccagtcatgctttgggccttatttctttcacatcatcctgtatccatctttccttttctgtgtgctatctaaaaattctctctaatagcttgttgtattttaattttatgtcccccagttttactggaaattcctagctggcaagaaatttttatttttaaaaaatccagaccacattacccagtagttctttactctttcctattctgagggtctgaggctgaatttactcatcccagggtccttttggcttcattgctgaatgagtgaccagtctgagtcccatgaaaaggttcactctatatttgttgaatgggcaacaacttcaaataagtataaatactatagtatgaggcatataaaatggtaaattgaatgcaacagcactgtagttcttttctgcaaacacctttaacattattcaagggaagcaataaaggcaaagcgtagtcatttgttggatcactttttattttggaaacttttcagctgttaagtaacatattaatatttctagccaacattaatgctcagttctagaactggttatagtactctaattaaggaacgcagacctgggaattcatacctgattcagacacttcaatccttacgtcagtgtgtctctctcttactcaggtctaaaaccagtgaatcattgtaaaagttagtattggggactgtctggtaccattgttaatattttgggctgtgatgaaatggcatggatagtttcatctgaaaatttattcagatttatgacccagtattcatcacaacaatctgaaaaactcttaagaggatagaaattgtatgacaaagtgagtcacagtctttgtgatgtgatgtctgcaagggtgggtgggagaaattactgaatgaccagtctcattctactcctttctaagctgaatcattttgtaaatagaaaacaattcataagtttttaggtggccttacatcaataggaaatggaagagattaaaacggtcaaataatgcttccatttaaaaaattacttttggaaacatatcacttgataaacactttgcttttgaattagaaatgcaaataatctttctactgcctgctatatatcttttaatccaatacttgctgcatgtcttcatgtattcttactttttctattaattatgttacttttcttgcctagattttttttttattctaccaagtgtcatttgacctttcgtcttatagctatttctagtgttggctcatttggagatggggtgtgtgtgtttgtgtgttggggagaggtgtcatttactcactggctggatgactacttgaattggatggggactcaagagaaaaaggtccctttgattttggaaattctgattctgggatggtatcatcttgcattttgcattgtgggtcctcttctgttaacttttcatctaagcttttctccgagtcatattttacctttaaatgtaagacttattaacattatttccttatcttctttggggtaaggcatttatttaaaaaaagctaagtgaaaagagaaatattctattttgaatgtgtttctaagtgttagttctccttacatatttatatatatctacattactctgaactcagtaatgggagtataattgaagtgagattgggaagataattttgttaactgttttaattgagtgtactaatgtataaagacatagacagaaggtgttggattgaaaaataacgaattacagagacaccctcagctgttaaaggatgagaaaagtgagacatagattattttttggagggtggtatgaaagccctgaagtattcatgggatctgtccagctctgtccagacaatgagggagactgccatggtgactaggcagagtccctttgctctgtggtagaggaagggtcaggtgtttggcctttaccactgcactatgttcctaggaccctgatatttaccaagtacttattgaatgaatgagtgagtgaaatttttgagaacatgctctatgccagctttataaataatatctgtttaatcttaaatacaaacttatgaagcaggtgttgttatcttcatttgacaagtaagaaaatagtttttttcctattggcttttcaaaacatgatctctttgtccataacaactggtgattgtgcattctagacttcttagtgtttagaatacaagttcatggccagaattccgcatggacaaactagcagaaatttgaacagaaataatgatttaagcaaataatttaaactctttcagaggctttgccatgtccagcaaagttgaagtgtgtgccatctattcctctgccccttcgtctattccactctcctttgtttaggaaagacttctgtcatgatttagtatgagacaattcttctttagtatttaagggcttcttaagatttttgagtggcatatacaaaaatagcgtagcatgtaattaagaatgaataccatacagccatgcactgcatcatgatgtttcggttaattgcagacctcatgtatgatggtggtcccataggattataatactgtattttaactgtatcttttctatgtttaggtaacacaaatacttagcaccatgttacagttacctacagtattcagtacagtaatgtgctgtacaggtttgcagcccgggagcaataagctataccatcatctaggattgtgtaagtacactctatgatgttcacacaatgatgaaattacctaaggatgcatttctcagaatgtatccccatagttaagtgacacatgatcatgtaacacagtggtatttgtgtatttaagcatatctaaacattgaaaaggtacagtaaaaatatgacattatagtcttatgggaccactgtcataaagataactaaaaggatgttttcaaagtatagttaggctcttccagaaaaaatcgagggtatcttttcagtatttaaggacatgtggtgtaagattttaaaacaacaacaacaacaacaaaagcagatgggcttgggtttaattttcttcattgagtgagattgtccattaatcaataattttctgagtgtctactatgtgagggaataaagaccaagatagataaagagataccaagaaagcatgtagcaagacacgtccggaaaagtgtctaaaaattaaactcctctttcctttattgactctcctgtattttcaaatggtatcaccatcttccttgccaaccaggcccaggtgttagagtgaatttctactatgtcgttttccccactcctcacttctcttctcaggccctgtccatttcatttctgcagcacattcacacttgtgccggtcactgcaatcttgctgcagcttgtctagttctaaccctgactactgcaactgctgtctaactgagctcatctgtattagtttgctaaggctgccataacaaacataccacagtctgggtggctcgaacaatagaaatttatcttcttatagttctggaggctggaagtccaagatcaggttttggcaggtttagtttcttccgaggcccctctccttggcttgtcgatggccactctctagctgcctcttcacaagatctttccactgtgcttgtgtctctgttgtctctttgtatgtccaggtttcctcttcttataaagacctcagtcagattggatgggggctcaccctgaaggcttcattttaacgtaatcacatctttagaggccccatctgcaaacaggagcacatgcagagatagtgggattagagcttcaacatgagttcggggaacacaattcagcccatagtatcccataataaaggatgttattctttgccagagtgagttaattactctgtctagttgttcagcagttggacattgttttttcctgaagaggaactctgatcatgttacttctcagaaactctcctgggcccttgcttccaaaacgcaaaagaaaagaaggaataatggtcatgccaaaaaaggccatagccacgtacagcctatttgtggcaggaactgtgcccgatgcatggccaagtacaaggctattaagaagtttgtcatttgaaacatagtagaggctgcagctatcaggtacgtttccaaagcgagtgtctttgacacctccgtgcttctcaagttgtatgtgaagctacattgctgtgtcagttgtgccattcatagcaaggtagtcaggaattgatcttgtgaagcccacacgaaccaaataccccgatcccgatttagacctgtgggtgctgccccacgacctccactaaagcccaggtaaggagctgagtccttaaggtctgaagaaaaactatcttctggaaaaaaataaaatgaaaattgtatttaaaaaaagagaaaaacatcgtggacttgaaagacttcaatctcctggtacgcacattgcccccagagctcacagatgtttcaagtctgtaaaaatcagaaaacataggaaagttaccagcagatgtgtggttgtcatagatataaaaaagtgggatacagggtgtttttggaaactctaggtaagtagtaagcttgatacagatctctgaaaaaaactccaagaggtttgagaatactgaaaaagaagataacagagtaagtagtaactagggtgctacaatgggagagtcataatatatacatagccttcgtgtgttaatttccatggaatatttgaccgaatttctcatagcaaccttctgtaaaagatgtgtattttcttcaagagagtctagagtttttcgtatttaggattcttaggccaggctccaacagctaaataagttttattggcacacagccaccctctttgtttaaacattgtctgtggccactttcacactacaatggcagatacccctcaaggtgtaaaatatttacttcctggccctttaccccagaaaatgtgctgacccctggcttaggccatatttttcatgaggagtggacactccttagtcatggcatttctgctattccgcactattacatttaatactaatttcctgacacttgatgtcagaaactgtataatattgtctatggcttttatggatattcctccaacctttggacaggaattgttatttccaggctgatctcttatttaaaaatgtatttattaatgatttaatatcacttttaataaactggaattatgcttttcctctaaaagaaaaaaaataaaggtgatatagatgcattatcataatctaaaactattttaatagacagctgatcctattttccaattactagtaaaacgtcatgcttcagatgattatgctaaaccaaagttatgttttttgctagaccgtccacccaacttttaacagcaaagtaactaattcctgtgtagcaggaaaattcacttagttatttccatatatattttgcaactcaactaatttttcttggaagatactgcaggaagttacattattcaaagttagatattctctgttttagtgaaattttaaaaaattaacagtttggatatttggttacacctactttgaatattttcctcacttaaattatttttggctatgcttaatgatgtagaactgtagagcttttatgttaaagaattctggagaatattggctctgcccatgggtatcactccagaagtggatgaatgttcctgttggattcctctctttttctagaagaagcctaatgcccaccatggctgacagttaaagcacacagttctgctctctaggttaggtaggacagacagcagaacctttctaaagacctgttgggggaaatactatttatggaagcctgcctcaacgatgtatggagtgcatctttcctccagacagagagttttaacctgggagttcatggatttgctttaggtttcccttaaaaatagatgcaaaatgctaggttgtttttctgaggagagggtgcatagcattttgtcagattctcaaaaggttatctgtggtccaaaatgttaaggacagtatcactagaaacactaaaatatgtcttttaattaatctgacatctgggagagaaccaatttgaaccacatgacagtgaaaatgagtttactgaattgtgtgttggggtgaaactttagtttatggtgagtgattttgtgagaaacatctctgtgaagctcgtctctgtgtataattaacagaaacattaaagaaatgttgaggactgttgttgatctcattacatagtgtccactctgaggttccttaggagaaacttctctgtggtaactatgttgggtctagttatgcttttccttagcagccagcttatttttatcttatggtctctgggaaatttcttattgctgctggctactagaaagccaaatatatggcctgcttctagcaagtataataatctcactcctggcttcatcagttttaaacccttcatttgtatttgccttattaaaaagccatttttaaagttttttgttttggtatattgtcaatatctttgtaactcaccttaaatattacttgggatcaaacacattatacctcaataaaaataatatattgattaatttgctatttttaaccacaaagtaccactatattatacagagcattgggtgctggagatgaaaaagtcaaggcccttgtcccttaaaatgtgttttgtttggcacgacaagaaagagatataaatcaataagggcaataaaatgttttgcctgctttgcttgtggtgttttccatgggacagtgagatcatagcaaggatagcagtaagttctaatggggaagtcataaaaggcttcaaacaggagtgacactgaacagaatgtttggaatcaagtagatgtttgccaggcagacagggcggggaagggcaggaaggccaaggaggcagggccaggtctggcatgttttgggaaccaaaagaagtttggaatggcaagaagtaagacctgctagctaggcagggactggattatgatgggccttgcaagccatactgaacaattcgtctttatcctagaagtggtggggagtcaatggagggttttaatcagagaataagaggattaaatttgggctttgatgagatcactctggcgggtgtgtgtaatagattggagggtgtgaagctggcggcagggagtacagttaggaaatgatttcagttatccaattgagaaatgtaaatctctctcagactattttcctgaacatagtaagtgatgtatggacatatcttcaaagaagatattgtgggtttggttccagaccaccgcaataaagtaaatatcacaataaagcgagccacataaactttttggtttcctaatgcatatgaaagctatgtttacattgtactgtaatcggttaagtgtacagtagcattatatatgttaaaaaaccaatgtataaacttcgtgaaaagatactgtatttttaaaaaatgctaatgatcatctgagcctttagtgagtcgtaattgttctgctagtataggatcttgcctcagtggatggctgctgactgatgaaagtggtggttgttgaaggttagggttgctgcggcaatttcttaaaataagacaacagtgaaatttgcggcatcagttgacttatcctatcacgaaagatttctctgtagcatgagatgccatttgatagcattttacctacagtagaacatttttcaaaattagaggcaaactcttcaaaccctcctgctgctttattaactaagtttatgtaatattctaaatcctttgtggccatttcaacaatacatatagcatcttcaccagctgtagattctatctcaagaaatcactttctttgttcttccctaagaagcagctcctcatctgtttaagttttatcatcagattgtagcaagtcagtcacatcttcacgcttcacttcaaattctagttctctttctatttttgtcccatctgcagttacttcttccactgaaggtttgaaccccctcaaagtcatcatgagggttggagtcaacttcttccaaactcttagtagtgttaatattttgacttcctcccatgaatcacaaatactcttgatggcatctagaattgtcagttatttccagaaggttttctttctttctttttctttttttctttctttctttctctttttctttctttctttttctttctttctttcttccttccttccttccttccttccttcctttctttcttcctttcttcctttctttctttctttttttttgactgggacctactctgtcacccaggctggagtacggtggtatagtcatggctccctgcagccttgatctcctggaatcaagtgttcctcccacctcagcctcctgaatagctgagactacaggtatgcaccaccacacccagctattttaaaaattttttgtagagacagggtctcactatgttacccagtctggccttgaactcctgggctcaagccatccttctgccttggcttcccaaaattttggaattacaggcataagttaccatgcccagcctccagaaggttttcaatttactttacccagatccattggaggaattactatctatggcagctatacccttacaaaatacatttcttaaatcttaagacttaaagtagaaattacttcttgaaccatcggctgcaaaatggatgttgtgttagcaggcatgaaaatgttaaccttgtacctctccatcaaagctcttgagtgactagctatgttgctagccaacagtattcttttgaaagggatgttttttttgagcagtagtctcaaaagtgggtttaaaatattcagtaaaccacgatgtaaacagatgtgctgtcatccaggctttgttattccattgatagggcacaggcagagtagatttagcataattcttaaggccctgggattttcagaatggtaaatgagcattggcttccacttaaagtcgccagctgcattagcctctaacaagagagtcagcctgtcctttgaagctttgaagacatgcgttgacttctcctctctagctgtgaaaatcctagatggcatcttcttccaagaaaaggctgttttgtccacattgaaaatctgttgttagtgtagctaccttcatcagtgatcttagctagatcttctagataacttgcgctagcttctacatcagcactgtctgtgttaccttgcatgtttatgttatggagatggcttgttttgttaaacctcatgaaccaagctctgctagcctccaacttttcttctgtagcttccttacctctctcagccttcatagaactgaagagttagggccttgtcttgtatttggctttggcatgagggaatgttgtggctgtttggatcttctatccagaccactcaaactttctccatatcagcaataaggctgttttgttttcttatcattcttgtgttcactggagtagaacttttcattttcttcaagaattcttcttttgcagtcacaacgtggctgtttgtggcaagaggcctagcttttgacctatctcggctttcaacatgccttctccactaggcttaatcatttctagattttgatttaaagtgaaagacaatgagactcttcctttcacttgaacactgagaggccattgtaggtttactaattggcctaactttaatattgttgtgtcttagggaacagggaggccctaagagtggtggagacaggggaacattcgtcagtggagcagtcagaacacacacgtttattaagtttgctgtcttatatgggtgtagtttgtggtccctcaaaacaattacagtggtaacatcaaagattactgatcacagatcaccataatacatgtaataataatgaaaaagtttgaaatattgcgacaattacccaaatgtgagacagacatgaaatgaacacatgctatttgaaaaaggtcactgatagacttgctcgatgcaggatttccacgaaactttaatttttaaaaatcatagtatctgtgaagagcaataatgcaaatcacagtaaaacaaggcatgcctgtatatgtgcaagaatggaagggtctccattttattaagtgaaataaggaaactattgaataatgctgaaaatattagtccatttatgaaaatgcacacacaccaacacaagatatatacttgtgtagtaaataggaagactgagatctgaaaaggatgtatacctaactgctaacaagtgcttacagctttagagaaaggaatgggattaaaagagacgagatcaaggggaatggtcacttctttacctatgtatttgtgaattttttaaaagaatgtatccatgtattatttatgcaaaattttctgagaagaatgaatgggaagtgaggaagtggatgcagatgttgaatacttttctctgaggtgcatgaatgtgaagggaaggagagagataggatagcagccagaagaagttcctgtttcgggaaacacttgtggactggggttttttgccgtcagtcacacgatggatgcacgggtgggctgtggagcactcctgggaagggggcatggtcaggcctgtgcccgcgcattacaaggggcgcattcctcactcattcatctgccccttggcttatttcttttcaagtcccacacagagaagcaaggccttgatcattatcagcacaactgctttactttccttcaggaaatgatacttaattagtatttgaaagcagtacattatcttgaattcactgtctattctaaggcaaagcacaccaaaaatctaaaatcaaatatattctccatgatgtatttacttttctaaggtgagagaattataaccgtattctttgggaatgtcctcttatactcacggaacaatgacttgggagagacaggaaaggcctggatcagaacacagaggactagattaagcttaatggaagctaggagtctgtggagtgggagtgctacaggtgtatcttggactgaccccatggactgggtttggtctatgagcagcagtattcactggaagtcaacctggctttggagtctcatcacagaggatgaccttgctatgtggaataggctgcctggggctgggactgatgacctgatgacctagcaactcgatttttaggaggcttgtttcagtctgggctttccagagaaactgaatgaataggagatcactctatctatctatctatctatctatctatctatctatctgtctatctaatctatctatctacctacctacctagagggatttattttaaggaattggctcatgtgattacagaggctggcaagtccaagtccaggccagcagtctggagacccagggcaaagctaatgttgtggttcaagaccaaaggccgtctgctggctgaattccttcttgctggaggaaagcagccttttgttctattcaggccttcaactgatttgatgtgggccccccacaatatggagggcaatctactctactcaaagtccactgattcaaatgtaaatttcattctaaaacacccttacagaatcatccagaataatgtttgacctaatagctgggcactatggcccagccaagctgacacataaaattaaccatcacaaggcatttgttgacataaaccctagactggcctgactgtccaaagagggtggtgaataagccctggcttgggtaagaccaacttattcactatgatgccccaaggacacgggtcagagacttcctaacagaggtactagactggcctcctgttgacactgagaggttcagttttgctttgagcctcagctcaacactgagaccctaaggagtctccttcttccatggctagtgccttccaggggcacatggagtccaggttctttcttctggtttctcttgtctttcccctgaggtgtgtgggttagtttttcttcttcaggatttctgaaaataggaataataatcttattccagaagaaaggacataattatgttaaacaaaaagggaacattcccaacttgatcacagtgatcgtgatgtggagatgttgtgggctgctgttgcctgtattctggagacttgtggtcacagcagtaaacaattgctgctgggcctgttgtctgtcagctgccatctgctccaaagcaccccctactcttcgcttgtccctttagttgacctgggcctcagagcctgtttctgaggatatgggccacagaggggaattgaggctgcaggctgattacatagcactggtggtagtttcttttaaagtcatgttctgatctgtggttgcaaatgtctgctgcttctgtcagagcattattcccctttcatgtggaagaaaactgccattgattagaagcaggagtatcatcgtcagtagaagcacttgtgctttaggttctttgagcctcatgagaggtccaagatgacactgaagtaaaggaaggtggataccagatgccttggctactttttagaatacatcactggcactgctaggagagagctgggattcatgagagtgggattaggtgctgggccaggagcagagagtgttctttgtactgtggatctcccttacttgcttcctggacaactggctcttccggactgggtctcttggtctatccttgtgtccttaggggcaaggtgcttctccactttgaagctaaaacaccatatcagaatcctaccaaatacatagacattttaacatgcagcaaaacaataaaatctctttggtggcttagttgctatagaaaaagacaaatgttcccaaccaaagtgcccatcaatgatagactagataaagaaaatgtggcacatacataccatggaatactatgcagccacaaaaaggatgagttcatgtcctttgcagggaaatggatgaagctggaaaccatcattctcagcaaactaacacaagaacagaaaaccaaacaccacatgttctcagtcatgagtgggagttgaacaatgagaacacatggacacagggaagggaacatcacacaccagggcctgtcagggggtggggggctaggggagggatagcattaggagaaatacctaatgtagatgacgggttgatgggtgcagcaaaccaccatggcacgtgtatacctgtgtaacaaacctgcacgttctgcacatgtatcccagaacttaaagtaaaataaaaaaaaaaagacaaatgttctactaaatggtgagcttagcttggctagcacagtgtgggtagatacattttaaggtataggaacattgagggacttcatgtctgtgatattcagtaatttctttgaagtaggagggaatgctgtctctgagagagttgtgactgctggctgggtagccttagagcatggtgtagagaataggaaaggaaattaaccagggatatgcccaagtggctaacacttgctgagggcccacttgaggctggagacctcatattgctaataacaccagtttggatgaatgtatcatttccagaacattgtgtatgttgaacattgtgtatgttcaacaatgtatgttcaagaatgcagaagctggctgggcgcggtggctcacgcctgtaatcccagcaatttgggaggccaaggtgggtggattgcttgagctcaggagtttgagaccagcctgggcaacatggcaaaacctcatctctactaaaaatacaaaaattagctggatgcagtggcacatgcctgtaatctcagctacttgggagactcaggcacaaaaattgcttgaacctgggaggcggaggttgcagtgagccaagattgcaccactgcactccatcctgggcaacaaagtgagactctgtctcaaaaaaaaaaagaaaaaaaaaagatacagtaaaagttgtgagttgagcaaaatgttatatatttgtttctggtcttggaacaatgtacttgggagggccagactcctttctctgcctgagataagagatttcgattcagagcatcttaaacagaattaatttctgtgccttaaacttttccttattcttccagaaataacattgagcgatggtggatgactttatagatgtctgatttttttcttctcttacatagcctcatatattttttggaggaagcagaaagaaaaaaattaagtcatgggagcagacaggataagggaagtagaaagtagaagagggaaaggaagaaagagaaaaaaacaaaaacaaaataaagtgagaacaagcaagagaagatttaggttgaaacagacattcatattcaaaactcccaagtagctagttgtatgggactcttagcgctctcttcagagagcggttccaaatctcacaagaagaagggagcaaaaaaaccaacatgaccagttttttgtggcacaggggaaggaaacacattcaatagttgtgattttaggcttcttttttgggatggaagtgtcagtactggagccagaaactatttcctttactacctgtgtacttgcttttatgacgcttagaaaatgtatacactatagctattaactatgtctttttagtgtaagaaataagaacacatagtataagaagactttctttggggagagaagacttcttggtattttcatccattcccctacttcccctgctcccccatccttgcatccaaccaattgcttggatcaaagcacaattttagtattatttcaacctgctatgtcttgttggatggcaaatgaagagataacagagtggcatgcttcaaaggggcagtgtggttcagcattcagcaaaagaagaggattaggactgctgatcttgaccctagattgctgggtaactttaaggcaaaacaatttaccaacctgtgacccagatttcttatctttagcagagaagtccagactagatgatttctcagggccaaattttaaggatttttgactcaaattctgctggaggttcagtttttggggaaggctgataatatcattagaagtaggtatggccaatagaaaagagtataatcccagaaaagagggtacttcacaccagctctgtcactggagatggtcagagactgtttaacaaccctttgatcctaaagcaaataggcatgtgaagctaaattctgttagccgaaatatggcttaaatgtggctctagtagatagtgttgtgagttttaaagtatatagatagaatgacaagcaggaactgactgtctaaataggggctagaattgatttcttagctagaatgtgttgaacagctattattaaaagtagagaaaatgcaaaagtgcaatcatgtggcttttcttcctggccctaaccctagcctcagccctttctttctttcttctcatttctctggtgagctcattctcacagtttcatctttcacatatgtgcaggtaacaggtagacttgggtttatgtctcagctgtgccttactaattctatgctcttgggtaagttaatttatttaaatattagtttcctcatctattatatagggatactagctgataatagctactatgttggtattgttgtgatgattaacatgataatataggcagtgtgtttaggatagtactgtcaaataataagtaaccattttactgttatttattattcctaaatctctcaaagcttatatcttatctgtcctccactgcttcagttgtctattgctgtgtaacaaacatctcaaagctgtgtggtctaaaatagtgattttatattttatgattctgtgggttggcctgggtgcaactgcatagttcccctggtataatttagaatgtgtcatgcagctgcagtcaagtggtcacggggacaagaatatctgaaatggctttacttacatgtccaataccttagcagggataactggaatcctaatgatatctttctccaggtgctgtctctctcaggttagcttgggctttttcagtggctggatctcaagaggaaagggttccaagagagcaagctccattgtgtaagccgctgtttgcatcctgtttgctaatatcaaaattgccaatgtcacatcagtcaacatgtctaggactagattcagtttgggaagagctacagaagatataaatatcaggtggtgtggtacattggagccaccaaaataagtctgccatcagataaacaattaattcctcgcttttatgagcatggaattggtgctagatcataaactgactatcctcattttaccaactttcccttaattgttttctgtgtcagtttttcatatttccaagttgaaaccccctaaacacaacatttttttccactgctcattttttaccaaaattcaaacttcatgaaaccctggcatttcatcctttgccttccatcctcatggccaccatcaaagtccacatctttattatcttacatgtgaacagctgtaataacctttccagttattaattctttaaacaccacttttagcctgatgcatttcttttcaagaacctacggtatgtttatagtccagattgcattaaacctaacctttctgttatagggcccttttctgaggccttatttatcttgctctgcaccatttatataactattttctggctgagcacagtggctcattcatgtaatcccagtactttaggaggcagaagcaggtggattgcttgagctcaggtgttggagaccagcctgggcaacatggcaaaatgccatctctaccaaaaatacaaaaattagccaggtgtggtggtgggtgcctgtggtcccagctacttgggaggctgaggcaggaggattgctggagccagggaagttgaggctgcagtgagccatgatcatgctactgcactccagcctgcatgacagagtgagatcctgtctcaaaaataaaataaagtgaaataaaaataaaaactattttttactattgtatgccctccaccctccagaatcagagtgtgatgaggcaagttatttaataagagagttttaagttcatgtatattataaatatcttaacacacagaggggaacagaggagacaatgctgaggtagagtaaaaaccctgaagacaagatgtaaggaggaagggattttgttgttgctatttgtacttttgagaattaggaaggagggaaaaggggaatcaggaaatatttcagggagttagaaattagatccccttcacggaattccccaatatttaaacatcttgaactgtcttttgttcaccacactactcctgctgcacttgggttacgcatccatacccacgtggtctgtttttgtagttgttactggaatggtgcgagggtgtatatactaatgctgtgcttgatactcaatgagtgcttcataaatgcttgctggatgaagaatataagcaaaacttacctaattccttatcttttataaactaaaatggacaatattgataggagttaaatgaaagaatgaacgttcttatatattaaatggagagagatgcagaatgcagttttgttaattatcttcactattaaaaatagacatttgtaaagcatcagtatatgtgctgtatttgctgcgtctagagaggagctgggatggatgaaggcttagctggttatactgcacaatgagagtacctgtttcttctgtagatagagcatagaagatatactaggaacatggggaaaagccattatatattttcttttttagatctgcaagccttttggatgtgagaagattttttaaaaggacattaaaaaatagcttctttttcacataaggatacaatattttaaagtagtaaacatagaaaggcattcgcctacagaattctaatgagcatattcgttattcactgatactcttttgatggctgtgcatttcctttccaaaaacacaatatttttgtgaaaccagtggtagtattcgaccctggcaatcaagattgtgtaaggaaatggtaaacattttttggagaagagtctcccgcacctcacaggcttttaacaacaatttcaaatagcatattttaaagaactcagctctggagtctgcctaattattaacttctacttagaggcagctgcattcttgagggtggagccatgatcttcttttactgtgatcctgttttattcctttaaatactcagcacagctgaagaagaggtcctgttttcttactgaagactttcaggcaaaggagccgtttccaacttcctactaagtccacccagcatatgtcatgcaggggatgcggggaagaattttccttgcaagggccttctcagaagttttggagatgggccttgagctcttggctggaagcgtggttttccaaagtggaggctgcagtaatgctcgtcattgattgagagacgtgctgccggggctattttcatgggagtcaaataaaactctcttgtcttaagcctgctttgaaaggtgttttcctaatgattttacagtcaaatagaatgactgtgtgggagagtgtattaaataactggaacactctgggcagcttcccttccccaccctgtgcccctacttgcctttcccccaaagctcctcctcctccgggcacacacatgccgctctgttttctgttctggagctgcctgaattgtgtgatttttgtggatgaatgtgaactctttaatccagaaagaggtgccaggaacacaaacagcccggctaattggcattcacccctagggaaagtaacatggccaacaagctggttgcattatctccatgaggcacttacttaattaactttgaggagaaacctcaagctctctcaaatcacccaagaagcatttcgaaaaggaagaatttgccaagaaaaggctatattcaggaggtgttccatctcttgagtatgttggattagttgcagaaatacttacttaaggcagcttatatttttgtttaatctctttctgagctgcttatgatttcagcgtactgagaggaattttcaagaattgatttatattgaagaactcacatttcaaaatatcagcagttttgttgaagtatttctcagttgtttttgtgaaagtattgccaaccctgactgaaggtctgacttccaacaacttgttccatatgaagatactgacttcctcaaaggcctgtctgctgctgcctcctcagacaacagagcaggttgtctaaaccatggcacttccacctccagctttggaaggcctctgctagaagacattttctcataagtagtgcagatggtgccctaggagctgatgagcttcctgtttattcagtaagcgttgcaggaaatacaaagaaatgtcaggtgaccaaatgttctggggtcaccagagaagttcttaacattcccttactaatggaaatgagaaaaatctgtagattttcagctatctgaggaacaatttttgtctttaaataatcctctcccctcttctaattactaaaagtgcaaccaacaggtagcaaaagtgatatttgagcttcatccttcttttcttctgtccccgtaccctcaccttctagtgaaattactcagagactatgaagaatagggattggaagaaattgagagctcatggtggcaggatagcccacagaccatatgtgtctctgaataagggagaatttgataagtagaataagccatcagaaaaaaaaattttcaaatagtgattcctcttcaaaacattttacatattttctctaatataattattagaataaaatcattgaaatttagtattaattgaaacctctcatcagatttttatattgtgttacattgtgttatattgtgttcaagacacaatattcatttggctttaagagactgcactagaatgtaaaatccacaagagcagagacagtgtctggttcctttcagtgctttatcccttgtacctgaatgggacctagttcaggtactcagtcaacaatgaattgtaaaatgaaaaaatctaaatacagtggaggctatttggtctgcgggctcttctgcccttgggttctcaatttcttccattttctgttctaacatggaaatggaagttacactaaaagtaatatttaaaggaatcttatttatattgcttagcttctttctctcaagtaatttctagatcttaaagcacagatttaaaatattaattattaagctagaagtagagactttgaactagttggctggtattttctaaattaaattttaaaattttgagataattatagattcattcacatgcagttgtaaaaagataatacaggcagattccttgtactctttacccaattttcccccattgtaacatcttgtgaaacagtagtacagtatcataacccagatattgacattgattcattcaagatacagagcatttccatcatcacggtgattcctcaggttgcccttttataggtgcactcactccctcagccccaccttgggaaactacccatctgttctccatttctataattttgtgggcaacttatttttagaaacatttctccaacagctggcccctgagaagaaaagaccatttaacacatatagggttgatgcgttttgtaggtggaagccaggtatttatagatgcatgtcgtcagtgttgcctggtgttgctgtgccaggagtcagtgtggggtcctgaaatccagattactgaggtgttagtactgtaattattcttaccagaaaatgccccagccaaaagtggatggaattttcccacctgaattacaatacctccacaaaccaggccaagaagtgtcctcagtggcagagcatttctagcctttccgtgatgctcagatagtcagataatgtctgtaatccctaatagctacagaacagatgagggaaggtgtcctctctacctgtcaacttgtgactatttactgatgagtactgggactttgaactccccttttctctctatctctgaagcttatctttgctgctgtgcagttctttgcccctgtattgcgcctggagcttctggaatgccacaagatgctaaatagttcctaccttttccttttcttaccatcaatctgacttaattatctgatggtgtcactatagaaataaaagccattggcattcttaaacaagcagctgtgctgttagaagaatcaggagtcacctgatatttacagctatttgggcattgtgttacagttgcttgtattggtagctcagccagcccaaacatatctcttttagaacatgaggtaataaagccagtacataagatattggaggaaattgtaagtttgtatggattgaaattgtttctaacagcctacctttggcataaatcagctgtacatctttaaattttttaaattacataagttaaatggtatggcttagaagtaaaattttggcaagagatttagtatttcagacattgtatgttgcacttatttttaattaaattgttttaattattttgtcatcatctacaatcttaagtttcataataaaaaccatttttactttatggctataagagttgatacacagaaagatttaatggactcgtaaagccatgtcctgattgggtagtaatgaaggaatgcacagatttctaagctagctcccttcctttctttctttaatttttctttctttcatattatgcccaattttaaccttgtttgctagctgaggagttgctaagaattttaatgaactatctgggtgtctaatgttcttatttataaactttaattagccagttgaattgtgaagagaatggaatgtgtggttttgggcttctgggatgatatgcaaaataaaatagtaaaaaaagaaagtttactgagaggggcaatatgaaatgtgttagtcatatttgtatctgatctttgtaatttatctgattattaccatgggtactccatatacatgtatgaagatgtaaagtttttcattttcagcaaatgagttcctttttttttttccttttactttgttttctttttggagacagagtctcgatctgtcacccaggctggagtgcagtggtctggtctcggctcactgcaacttccgcctcctgggttcaagtgattctcctgcctcagcctcctgagtagctgggactacaggtgcatgccatcatgcctggctagttttttgtattttaatagagatggggtttcatcgtgttgcccaggctggtcttgaactcctgagctcaggcaatctgcctgccttgtcctcccaaagtgctagggttacagacgtgagccaccgtgcctggccaaattagttccttttgttacctagcctcctttgtcagttatctatgcattaaacggttttcagtgcctggtcttcagcattggattggatgatggctgatggaagaaaaaaaaacagtggttataccttggaatttagttttcagttactggtgaattttagatccaaggagactactaaacctggctcagttatttttggacaccaaaacataattttattggaaagcgaacacactctatcaaccaattttaaataaaaaaggtcttttgaatcagccagaagttaaaatgtgagcattgtgttctgagctgaagatgtcaggttatgtgagtacttgttctctatagactaatatagtgagccttgaaatatagtattagacaactgctttctgattatcttagtaccctaaattgagagtttcagtttgcttgggtttcaaattacttaaatgagaaataatattaacactggcccaactaatgaaaaattatgcaattgccactaagccccatgagggtggagactttgtaggtctttgtcactgttgtatttctagatcctagaatagtttcctgacacataagagacaccaatatcaattactgaatgaatgaataggataatagattgagaaattatataaggtcttagtcttttttgcagtatttcccttgggaaataaaataaaactaaaaatttatttattctgtaggtaaagaactgggctcgctatggtaagacattatataagcataaataatatactttaaaaagatgcctcagccacattcatacttgccctcttctagatattctcatctttgataaaatacaaggattcctaaaaacataatttcctgaatctcaaaacaaagcaggtagggtgcaaagccaacatatttgagtgctatatactaaaagtttatatatgggtgtgtacatatgtatatacacacacacacacacacacacaaaagatctataacaactgtttcccatcgtacaggtgagaaggtaagctcagttacttggagatgaaggctgattttgaatccaggtctgactccaaaattcatgcatttgacaccatgttatttactctgagtactacagtttaacatctgcggtttacttcacaaacttcttgaaggagttgttcgcatttactgttcccaaattgttactgaggttaatctagtgaatacttttcagttttatattacctgtcatttttggtaccatttgatactgaaggtcttcttgaaggtcccacttgagatcctatctgcatttggtttctaactcctggtttcctacttctgaccactcttgtggggtttcattaaatttgtaaactatttggttggggtggaaatgacatcttacctatatcgagttttcccatctgtaaacatgcatagctccccttttaagtcttttaaaaatgattttcaataaagttttaaaattttctccataaaagtcctagatactatttgttatcatcataaatatttttttaataactaacagttctaataatgtgttgtaggtgtaaataaaccgaatttttatatattcttgtatcaagcaagttgctgaattattttcaatagttcatctgtatgttctcctaactttaaaagaaactttttattttggaataattttagatctacagaagatttacaaagactttacaaagttcctctatacccttcacctagatttccctaaggttaactttttttttttttttttttttttttgagacaagatcctgctctgttgcctaggctgaagagcagtggcccaatcatggttcactgcaacctccacccacccaggctccagtgattcttgtgcctcagcctcccaagtagctgggattacaggcatatgccaccacgcctggctatttttttgtattttttgtagagacaggttcttgccatgttgaccaggctggtctcgaattcctggcttcaagcaatccacccaccttggcctcccgaagtgctaggctacaggcgtgagccactgcacccagccttacttcttacatatctgtggcacctttgtcaaaactaagaaattgatactggttacaacgctggttctaaagtatagatttatttggattttgccgctttttccactaatgtcctttttctgttccgagatccaatccagaatatcatggtgcatttagtcccttgattttttaatggagaaaatggtactgtctgcaaataataactgttagataccttagtttccaagtattgtgtgtgtgtaggtattaggtgtgcatatacgtatcttcctgcactagctcgtactgaccactccatccaggctcttcttgctctacatcctatacttctcccataaatgttggtgcttccttggattatgtcctttgccctttaatctgcgctggctacacacttttgagaagatcgcagccactttacatctccctgtagggattaggcacagcctgcactcccaaggcagccactgttagctctgattattacctctttatttctaatagattccttttttgaactctggattcatatagctgactgctttctggacatctctgtctgaattttccacaggcattgcaatttcactgtgtctgaagggaacatatatcattgtcttctcttgccaactttcccctcctgctgctccaaccacctccaagttatccaagacagaaaaacctgggacctatttctgaactatttgctttattctttcctcccttcttctctccttcctttttgccctctttttacctccctcccttccttctcctcatagcccctgtgaatcctgcttccttcatgtctcccgtatttgttaccttctgtccactcccacagttggtgcttccttggattctgtcctttgtccccactgtttcattaaaagctctcattctttcatgctattacacactaccaaactccttaacatagtattcagagcctctggtatctccagcctcatttagtcccccatacccccttccacaacacacacatacatacccctacactccatgctacctaattgctggaagttccttagatgtgctaggctttctctccctttctcctttggaagttatataagatgctttctttttgttcccgttctttcttttccttactattgctaattctttcagtctccaatcatttgtcactgcttccaggaaacctctctgttcaggctgggttagatgtattctctgagtgctctcaaagtagcctgtgtatatttttctcatggcacttacagtattgagctttagttatccgtgtaccagtcctcatcgcctcaaccatgctgtatgttccttaaggctaaagaccaatgttatattttcctttgggcttcctattgcttagcacagtacctggcacatagctgttacccataaatgttaattgaattaatgagtaaatgtattcaccatttatggaaacactgacttgtctgtttccaaaaaccatattctttcaccagggacagatctctctaaatatcagcttccttatttctaaatagggaaggtgtactggatgatcccttacactgctgataaattggtattgtatgattctaagattcatcatcctggggcatatacaaaagaaaatgatgtggattgtggaagatattccaaaataggagttccaaaatattttaagcaatggtggtaatgttgaaataataatttggctttttggtcctactgtttaactaatgtgttgagtgccaatgatctgaacacttgaacatttaagtgatttacttatggtgatcagagtttctattcctttgctgacatatctaaatcattttagaaagattgtgtcaattctcctttgctgaagattttcaagtcaaagttggacagttgtttgtcatggatattgtagatgtgatttaagatataattgtgtaatgataaggctaagtgaccactaagattttgctttatgatgagatgcttcaattttgtagtttagagcttttgcttttatgttacaatattttaaaaaattgaatttaaagcttggataacatactatttatttgtctaagtttaggtcttagtggatttaatatcaacattagaaagttaccagaagtctatgtttatcaaaattgttgacttccatgcatccaaaaactgactctagggagtcatctccggcttgttaaaatgagctgggttaagtcagtgtctaaagtccaatttagaaaggtctcttagcacagccttttaaaaaatttataaaaatgtaaaatacaaacacagaaaatcacgtttaaaaatttgtactttagggaattattcctatgtgaacattcttataactgttgctcaggtcataaaacagaactttgccagccacctcagaagcgttctatgccctgtctctatcacagactgtcttccccaatgaaagtgtagacttatttcagtcacttctttatttttcttaatagtttttgtcatagaaataggtattctaaaatagtctactttagtttggcctttgaaaatatatgaatttttagctgttttcatgtcatgtcttccttccatccttttttctcccttgcaattacttgctaaagaaattggattgtttgatctatagagtttctcagcctgggttttcttgattgctctaggtgtgtaggacttaagtgtttagaacaggcatggctgtttcatgcctcagtcctggaatgacattctacccagaatatcattctcttttgtctctcccttgccaataccttgctcatgtggttatcttctatctatactccaaaacttagctcaaaactcacccctcctagaaatattcccagccttttcatttaataatggatatgtcctattctgtagtctcctagcacctgtaaaaaactccagtatgacaccaatcacatggctgcaattctttctttttctaaaaatatatatgtttagagatgtattggaaggagttggcttacaccatagtgggggctggtgaggcaagtctgagatccataggcaggctggcagaactggcaggctagaattctctggcataggctgaagtggctgtccacaggcagaatttctgctgggaagcttcagctctgctcataaggcctttcaactgattgaaacaggcctgcaacattttcaagaataatgttctttactcgaagtcaattgttgaaacaggcctgcaacattttcaagaataatcttctttactggaagtcaattgattatggactttaatcacatttacaaagtaccttcacagcaacacatagattagtgtttcattgaattactggggactgcagcctagccaagttgatacattaaaaaaaaatcacactgcatcttttgattttctttctgaatctctgcttttctttttcctaattttggcctctgtaaacctttcatttttttcatgctttagcattgtgagggacttaatactgggatattttttcacaatatcttgttcaccatcttacctgtcactcttttccctgaggtactttgatccaacagacattcactcgattctgttgtgtgtcgggcagtgtgccactgctagggatacagaaatggataaggtatagttccctaccctcaaaaagctcaccgtcagttggtgggggacagacaggtatggtataaaattactgtgagtggtataaaattacctgaaggcataaaatatccagctagtgttaaaattttcctgatggtctcatattttctttacagttggtttattctccatcagaagttgaacaaggttcacatatcccttttgggtgatacgtctccaaactccctttataattgagaaattctctctttttccttgaactcatgaatgtgcgtattttcagtcatgtttaatatgatgcacagttggtatttttattctagattgctttaaagttttaacaatgctaacattgttacatatggatgtaacaaagttaactccctttttaattgagaaattctctctccctccttgaactcactcatgaatgtgcttattttcagttgtgtttaatatgacacacagttggtattttattctagattgttttaaagttttaacaatgcaaacattgttacatgcttattataaaggtaacatgcacaactgagaaaaaaatttaaatatcacaatgcatgtggaagtaaaatatcatttttatctcattatccccaaataattggtaaccctttgggattgtttcctactaatctgtacatattcaaatgtacagtttttacatattaaatattccctgtgctattactttgggtttaatttgctcttatttttctagatcataatgtagaagcttagatttttatgttttgtttatctaatacaaatatttaaagctgtaactttcccattaaacatgctgagttttcattatcataaaactagaaatattttctaaatttctttgtgatttattttctctgtttttttttgtttgtttgtttgttttgttgttgttgttgagacagggtcttctctgtcatccaggctggagtgcattcgtgctatctcggctgactgcaacctccgcctcccaggcccaagcaattcttgtgcctcagccttctaggtagctgggattacaggcgcatgccaccatgcctggctaattttttttattttttgtagagtggggttttgccatgttggccaggctggcctcgaactcctgatctcaagcaatccacccatctcccaaagtactgagattataggcatgaaccaccacgcctggccttctctgtgttttatttggaaatgcattgcctaatttccaaatatttggggattttccagatatcatattgctaacatttctactttaatacatcatatgatttcagtcatttcaaatgtattgaggcttgttttatggtcaagcatataatttattcttgggaacgttctatgtgcccttgaaaagaatgtagattctgcagatgttgggtgtagtgatctttaagtgtcattttgggcatatctgcatgcaaaagaatgaagttgtgccacataccacatacaaaaattaactcaaaatgtattaaaacctaaatagaaggggtaaaactaaaacttggaggaatgcataggtgtaaaccttcatgaccctagattaggcagtgattttttagatatgacaccaaaagtacaagcaacaaaagaagaacattgataaattggacttcatgaaaatttaaagtgtttatgcttcaaaggacaacatcaagaaagtgaaaagaggccgggcgcggtggctcatgcctgtaatcccagcactttgggaggccgaggcgggcggatcacgaggtcaggagatcgagaccatcctggctaacacatgaaaccccgactctactaaaaatacaaaaaattagccgggcgtggtggcgggcgcctgtagtcccaactactcgggaggctgaggcaggagaatggcgtgaacccaggaggcggagcttgcagtgagccgagattgcgccactgcactcccgcctgggtgaaagagcgagactccgtctcaaaaaaaaaaaaaataaataaaagtaagtgaaaagataccccacaggatgggagaaaatattctcacatcatatgtctgaacgggatttgtgtctagaacatataatgaactctttcaactcaataataaaaagacaatctaaaaatgaatcaaagatctaagtagacagttcttcaaagaaggtaaccaaatagccaataagcacatgaaaagatgctcaacattattacccatcgaagaaatgcaaatcaaaaccacagtgagatattacttcacactcaactaggatgcctataattgagaaacaaaaacagaccataacaagtgttggcctggatgtggaataattggaactctcatatattgtgatgagaatgtaaagttgcattggaaaacagtctgacagttccacaaatgattaaacatagagttaccatatgacccagtaatttgactcctaggtatatactccccccaaaagaaaacatgtctacacaaaatcttgtctacgaatgttcatagcaacgttatttacgtagccaaaaagtaaaaacagtccaaatatccatcagctgctgaatgaatgaatcaaagtctagctatacaatggactattatttggtgataaaaagtaatgaagtactgatacatgctacaacatgcataaaccttgaaaacattattctgagtgaaagaggcagtcacattttgtttatatgaaatgtccagaatagacaaatctatacagacaggttgcccagggttgggatgagtggtattagggacgtgtaaaatgactgctaaagaatgtagggtgacgaaaatgttctataattgattgtgatggttgcccaatgctgtgattatagtaaagcacattgaactgtatgcatgttttaaatgagtgaattgcatggcatgtgaattatacctcaataaggctataacaggtaaaacaaacaaaggaaccatgggtaccaacagttcagaataagtgccttcgatattacttagtattatggtgtctttggaaaaggaatttctcagatggagttaattgatttgaacaattcaagaccagtaggcaaattgccatagatggcttcccaagctggcagttaatttttttctgttaaaaatatatatttttttaattttttagagacaggatttcactttgttgcccaggctggtctcaaaccctgggctcaagtgatctgcctgccaaggcctcccagagtgctggaattacaggtgtgagccactgtgctcagccacaattaatgttttggaacatagttttcaaatgactatattaggaggatgaagtcttaggtaaatgaaacttacctgatttaaacaacagtatcatttaaatcacgattggtaatgctgttcacaccttccatattcttaatgatttattctcttgtcagtttttgcttcagatattttagagttctattattagctgctaaacatttaagatgattatggtgaccctgtttatttctggttatactacttgccttcaaagctatattgtcagatattaatatagccagatcagctttcttatactgaaggtctgcattttacccattttttccacagttttactattaacttgcctagtaaattaaggtgcttttcttgtaaacaacatagttaggttttgttttttcatcttgttgacaattgtttccttttagtggtgtgttggacatttatattcagtgttattattgatatggttagtttaaatctgacattttgctatttttctttttttaaaatttcttctaaaaaaatgggatacatatgcagaacgtgcacataggtatacgtgtgccatgctggtttgctgcacccattgacccatcctctaagttccctcctttcactccccaccccacaacaggccctggtgtgtgttgttccccactctgtgtccatgtgttcttattgttcaactcccacttacgagagagaacatgcggtatttggttttcttttcctgtgttagtttgctgagggtgatggcttctagcttcatccatgtccctgcaaaagacatgatctcattcctttttatggctgcataatattccacggtgtgtgtgtaccacattttcttgatccagtctatcattgatgggcatttgggttggttccatgtctttgctattgtgaatagtgctgcaataaacacacatgtgcatgtgtctttatagtagaatgatgtatattcctttgggtatatacccagtaatgagattgctgggtcaaatggtatttctggttctagatccttgaattgccgcactgtcttcaacaatggttgaactaatttacattcccaccaacggtgttaaagtgtttctatttctccacagccttgccagtatctgttgtttcctgactttttaataaccaccattctgactggtgtgagatggtatctcattgtggttttgatttgcatttctctgatgatcagtgatgttgagcttttttccttatgtttgttggccatgtaaatgttgtcttttgagaagtgtctgttcatatcctttgcccactttttgatgaggttgtttttttcttgtaaatttgtttaagttccttataaattctggatattagacctttgttagatgggtagattgcagaaattttctcctattctgtagattgcctattcactctgctgatagtttattttgctgtgcagaaactctttagtttaattagatcccatttgtcagttttggcttttgttgcaattgcttttgttgaggtctctgctctgctccattggtctatatatctgttttggtaccagtaccatgttgttttggttactgcagccttgtagtatagtttgaagtcaggtagtgtgatgtctctagctttgttctttttgcttaggattgtcttggctatacggggtcttctttcattccatatgaaatttaaaatagttttttctaattctgtaaagaatgtcaatggtagtttgatgggaatagcattgaatctataaattactttgggcagtatgtccattttcacgatagtgattcttcctatccttgaggatggaatatttttccatttgtttgcattctctcttatttccttgagcagtggtttgtagttctccttgaagaggtccttcacatcccttgttagctgtattcctaggtattttattctctttgtaacgattgtgaacgggagttcattcatgatttggctctctgcttgtctattgttggtgtaaaggaatgcttgtgatttttccacattgattttgtatcccgagactttgctgaagttgcttgtcagtttaaggagtttttgggcagagatgatggggttttctaaatatacaatcatgtcatctgcaaacagagacaatttgacttcctctcttcctatttcaataccctttgtttctttctcttgcctgatttccctggccagaatttccaatactatgttgagtaggagtggtgagagaggcatccttgccttgtgccagttttcaaagggaatgcttccagcttttgcccattcaatatattggctgtgggtttgtcacaaatagctcttattattttgagatatgttccatcaacacctagtttattgagagtttttagcataaaagggtgttgaattttatcaaaggccttttctgcatctattgagataatcacgtggtttttgtctttggttctgtttatgtgatggattacatttattgatttgtgtatgttgaaacagccttgcatcccagggatgaagtcgacttgatcgcagcggataagttttttcatgtgttgctgaattctgtttgccggcattttattgaggattttcacatcagtgttcatcagggatgttggcctgaagttttctttgttctgtctcttcttggtttggtatcaggatgatgctggcctcataaaataaattagggaggagtccctccttttcaattgtttggaatagtttcagaaggaatgatatcagctcttctttgtatttctggtagaattcagctgtgaatctgtctggtcctgggctttttttggttggcaggctattaattactgcctcaatttcagagcttgttattggtctatttagggattcttcttcctggtttagccttgggacggtgtatgtgtccaggaatttatcagtttcttccagattttctagtttatttgagtagaagtgtttattgtattctctgatgatagtttctatttctgtggggtcagtggtgatctcccctttatcattttgtattgtgtctacttgattcttccctcttttcttctttattagtctacctagtggtctaatttgttaatcttttcaaaaaaacagctcctagattcattgatttttttgtagggtttttcgtgtctctatctccttcagttcttctatgatcttagttatttcttgttttctgctagcttttggattagtttgttcttccctctttagctcttttaattatgatgttagggtgttgatttgagatctttcaagctttctgatgtgggcatttagtgctaaaaatttccctcttaatactgctttagctgtgtctcaaagattctggtacattgtctctttgttctcgttgttttcaaataacttcttcatttctgccgtaatttcattatttacccaggagtcattcaggagcaggttgttcaatttccatgtaattgtgtggttttgagtgagtttcttaatcctgagttctaatttgattgcactgtgttttgagagactgttatgatttcagttcttttgcatttgctgaggagtgttttacttccaaatacgtggtcggttttagaataaatgccatgtggtactgagaagaatgtatattctattgatttggggtagagagttctatagatgtctactagatccacttgatccagagctgagttcaagtcctgaatatccttgttaattttctgtctcattgatctaatactgacagtggggtgttaaagtctcccactattatttcataggagtctaagtctctttgtaggtctctaagaggcacaccccctccaccaagagagaaagtgcttcatcaaactggtcctattacccgtgccacccaattgggtgagaccctctaacagggggttgtcagacaccctatgcaggagcgatcctactggcatcaggttggtgctcctcgaggtcagaggacacagaagaagcaggcacccatctttgctgttctctagcctccttgagtaacatctccaggtgcaggagcaaatcagatagaatagggcctaaagtgaacccccagcaaactgcagaagccctcagaagagggacctgaccattgaaagacaaaaaaaaaaaaaaaaactagcagaaagcaacaacaacagcatcaacaacaacaaaaaatcccccacaaaaaccccattcaagggtcagcagcctcaaagactgaaaatagacaaactcacaaagatgagaaagaaatcaacgaaaaaatgatgaaaacccaaaaggccaaagtgcctcttctcctccaaatgatcgcaatgtctctccatcaagggtgcagaactgtatggaggatcagatggacgaattgacggaagcaggcttcagaagatgggtaataaaaaactacgctgagctaaaaggagcatgttctaaaccaatgcaaagacgctaagaacctttatgaaaggttagaggaattgctaactagaataaccagtttagagaggaacataaatgacctgatggagctgaaaaacacagcatgagaacttcgtgaagcatacacaagtatcaacacccaaatcaaccaagtagaagaaaggatatcagaatttgaagaccaccttgctgaaataaggcatgcagacaagactagagaagaaagaatgtgaaggaatgaagaaagcctccaagaaatatgggacttcataaaaagaccgaacctactatcgattggagtaccagaagaagacagggagaacagaaacaagctggaaaacacacttcaggatattatccaggagaacttccccaacttagcaagacaggccaacatgcaaattcaggaaatacagagaacaccaccaagatactccacaagaagatcaaccccaagacacataatcgtcagattctccaaggttgaaatgaaggaaaaactgttaagggcagccagagagaaaggccaggtcacctacaaagggaagcccatcggactaacagcagacctctcagcagaaactctataagccagaagagattgggggccaatattcaacattgttacagaaaaaaattttcaacccagaatttcatatccagccacactaaccttcaaaagcgaaggagaaataaaatcctttccagacaagcagatgctgagggattttgtcaccaccaggcctgccttaccggagctcctgaaaggagcactcaatatggaaaggaaaaaccggtaccagtcactgcaaaaaacacaccaaaatataaagaccaatgacactatgaagaaactgcatcagctagtgtgcaaaataaccaaatagcagcatgacgacagaatcaaattcacacattttgctatttttctaattatcctatctgtcctttaccttctgtctttccctttctgccttcttgggttaattgagtagttttaaaatatttcattttgcccttataactcagctgccaaatgtttgggttggtggggagctaaccttgctcttgaactgtactcctggctttccacatcttggaagatctctctttatcctgctggtcattggctttgcatttggtgaaggctcagtgcttctcagaaggatcactttcagccctttgacctgctcccagccttcagtggactgctgccttgcattctgcaaaggcccagtgtacttgaagaggatctcttagcccttctgttctgttcctagcctttggtgtgtggtacttgtgcactgggtggaagctctatgggaaagaactggcaggtggatatggagttgctctttgatcagggctcttcagaattctaattcctcacatcagcagctaataaaagtttcttaaaaattcagctggtttcttcgtggtcccatttttggcaagtttattcctccttctatcagagatgaagcagctatgcatctcttttttgggaagaggtcatctgtatatcgaatttatttaggagatgaagcagctatgcatctctattttgggaagagatcatctgtatattgaatttagtttatttaggttttttatgcatctcagctcagatagtttttatagaaaatctatgattttgtgacttcctcaacttcttgttgtagactctggttatttttaaaacttgtaatttaaaaattatatgccaatggaaacactcttcaagaatcttacatgtaatgcttattgcttagtggtttaatgaatgacaacaatccctgagtgtgggaatagttgaggtctacaaaaggttaatgagtaaatgaattatgtttactttgggtattgagtcactggtactgatctggccatacacgaatatccctaatcaccctcatgactagtaatacacatttataagatggtggaccagagctgggctagcgttgattgataagggacagaaagaaagtatagcgattgattattcagccttgcctcatgggcatttgtacatccttatgagttaaagtgagatgcaaatgcattcttcattaaaatggcttatctgaatcattttagagctgtatgcaataatttgcttatactcattaagataagtttggttatgttgattaaaaacaaagcttattttctgcattttccaataatattgtaaaaaatacttcatacccttcattgtttgggtttcatgtcttcattacattccttttacttcgtattatcttttaagattttgtagaagaatttcacttgggtaactgtaggcttaaatgatgcaatgctttctggaatccaggggtgactgacacacagaggtgactcagacatgaaatgttcaacaaaattctaagattgtcttttttttaaattgtaaattcttaaacattcataaaagtagtgagattagaataatgaaatcctgtgcttctaatgactgttaacacaagtgaatcttatttatcctatccactttattaaaaatttagttatctattatttaaaataatatattagcttattttaaagctaatcccagatattatgtttcattttgcatgtctgttgctgtcttggtaggaaaaattttaaaacataaattactatgacataatgatatctaacaaagttaattatttaagaaactttcaaaagttgctttttcatgccgtttccctagctacctataaacacctggaaattatatttattttatatttctaatgttattcaaatgataatatgctgatttctaaaattgcatttttttctgttgctctcaagaatatcctaaacatatccataggatgtgggatgacctatgaaaatagtctggacaaacatttatcttgtttatcttatgataagcagagttctgagaagtttggtaataaagagttaacttggtttaactaagattttcctaaattatttgacaccagaacctattttttatttaacatctgttagcaaaaatatatttgggggaatattgttctaggcaggagaatgctgcctctgaatagcaaaataatctttacttcatttttatttcaattaattaggtaattatttgtccatattacattatcatcataattaagtaatttttttttgtttttctgtaatctgcttaatattgataatgtggtgtgacaagtcatctttctcaggatcttattttatgaaaatctttcatcacacttattttatgaaaatcatttgctgtgtaagcaaattaagtataagcattttgtgtttccactagatagatatttgcacacaaaaaaatagacatcaaaatcccatatagaaagctaaatgcatctatagttcattgaagaggaagctagaaataagatgtgtagaagtcaaagaaatagggccgggcgcggtggctcatgcctgtaatcccagcactttgggaggccaaggcaggtgggtcacgaggtcaggagatcgagaccatctggctaacatggtgaaaccgcgtctctactaaaaatacaaaaaattagctgggcgtggtggtgggcatctgtagtcccagctacttgggagactgaggcaggagaatggtgtgaacctgggaggcagaggttgcagtgagccgtgattgtgccactgcactccagcctgggtgacagagagagactccgtctcaaaaagtcaaggaaatacagctcaaattataacagtgaataactagattttgtttcatttgtgaagaattggcaaataacttttaaatagtttcaacataggcagtagcatgggaattctcctacacttttatgtacccttaaaatatgttcactttaaaaaatgtaaatagttaacaggggcgattgaaagctaactgcccaacaaaggaaacaattctccgtgtgtcccccttctctgctcaccctgtgacaccttctctgctcaccctgtgacacaggagcgacaaggaactcacaaggcactggtgccctagtagttctgcatctcatcctctctcatacagtttagttgacatctgctccctgtcactcacccatacccccaacctcaccaatcctccaaagtggattagttgttgcttaggtgtgttttgtctttatattgcgtaaatattgtgaagaaggctctttcctctgtggtgctacaaagataattttttttcccgttacagtcaagctacaacttcaagcagaagagagaggagttgtgtctatcaaaggagtgtgtgctaaccgttacctggctatgaaggaagatggaagattactggcttctgtaagcatactttctgttttcacacgttttttgttagcttttattgctgttaatttaccagcattgttgtttatcaaatctttataaaggattttacgtgtatcatcgtcatagtcaccctgtaaaatagggagtattttctttatttcacagatgcaaaaactgatgtgctgagggagtaagtaaagtaagaaaacacagctcatataaagtagagactggattgggctggaggcattcctgacctctaagtcactgcttttactctgcaaaactattaagctataatttaaaaaaaattttcttctattatgcagttgtttgaagatcattgggaataaatgtatacaattttgattattagtttttaagtttcttctttagaatgtgacgtacaaaacactagcaatgtagaacactagttgagaatgtaagctttctgcctggtacagatgccgactctgccacttatgagctctgtgttcttgggcaaatgattctgagttagttctcttacctgtaaaatagaaacaatgatactatctcattgggattttatcagaatttaattagatactacacatcaagtgcccaaatcagcatctgacacgtaatagatcctgaaaattgttacttcttcctcacattacttctcatttacatatatgtcaggagagggacttttttttttctttttttttttgagatggagtctcactccactgcgcagactggagtgcagtggcgtaatctcgggtcactgtaccctctgccttctgggttcaagcaattctcctgcctcagcctcccgagtagctgggattacaggaatgcaccaccatgcctggttaatttttttgtattttttagtagagacagggtttcgccatgttggctgggctggtcctgaacttctgacctcaggtgatccgcctgccttggcctcccaaagtgctgggattataggcgtgagccaccgtgcctggctgtagagaggaacttttcttttttacatgttatcacagcttatcaggggtcctagttcctggctagtattctttccactagtacaggctccctgtcaacttcaccattattattagaaacgggactgcatatctgttgaacatatgatgtataaagaatggtgcaggaaaataaatataaaagacagatctcattcctgtctccgtgagggagtagataggacatgtatgtaaatgtttgtgcgtgtgtgtgtttcacagctcttacaccaatgccactggccagttatgacatctctatataacctccccacagaaaggatctaacagtactaagaaattgtggtattttgagctatacaaatagtttttgaaatttcttctgaatgaagacctttggatttctaaaagcaccaaaacaaggcttacagagaaaaagggtatctaaactatcccaatttcagactgactgtatgacaaagatatacttacattgatattaccagtttatgtaatttttgcaggataaatcacaagtttgagtgtagtggctctcaattttggggggaggtagttgaataaattttagaattctctttaagaatagccaatacttattaagtgaaagtgtgccagatgctatggtaggcattgagcttataaaattgaatatcaaattgtctctgcccttaatgagtgacaatccaggggaggcagaagtgtaaataagtatttataataatgtataagggttttgatatgctacttctatattttgcatacatgcatagtaatataggaaaggataagaagtattatgatataggaagcaatatagaaaatgaggtaattacatttttctagaattgggggagatgacctataagtagaattttagacgttgtaaaggaaggagttcagcaggcagtcatggggcagaagaaattgagatgaaggtatagataactctaggacataggacatgaaaaggtgtggataaaaaatctacttgatgtatctctagaattacaagtaattaactaatgctggaatgtatagtgcaatggagtaactaggtggaagggaagggagagaaggctggggaggtagatagactgtctgctgaatctgttgaagggctttatacaccatgctgactataagcagtggagagccatgaagagttttaagaagagatctaattagatttaaatttgagaaagatcatcctggcagaagtgtagagaatggacttgagggggccaagactggtggagagagatcagttagaaggccactgtaatagtccaagcaagtcatgttctgatcctggcaataacagtaggtcagagaggagtgaggaaagtgctagcacttgtgattgattagatttaggactgaagatgaaagaaaagtcaaagatggcttttaggttgctggtttgggtgagaaggtagacgagaaaggggaaggaagaaaagagcaaggtttgggaaaaggtagtaagttcgaatttagacctatttagtttgagttgcctaagggaaattcaggtaaagatgttcagtgagtagttgaaattataaatctggagcttagaggaacagtctacattgattgttagatagatttgggtatgatcagcatataggtggtagttaaattgggggaatgtatgcagtttcctaggtaaagaatacagctcaaaacattaactacttgggactttcacttcttctactctgtacttgccttttattctgccaatctattgtcagctcaagaggtgatgtaatagtttgggaatctaccaaagtagcattttaaatatctcccatgaaagtgaaccaataagtaattttggatgactgacattttattagtgagaggaagatgagtttccaaccctcctgcccctttcactttaggatgtgacaaatcactatgcttctgcagtagaattggtttggctactgtcagacagtgagggtggtagaggaaaaaaaaggagttgcacacaacatttgctcctgttataactaactatggacagcactaataaaatggttttaaagctccagccttttatatgtctgccataatctgggtcagtgaatgccttgagattagttgttaccctgtggtgttgttgagattagaagatgcagtaacctagtgcattagtccattttcatgctgccgataaagacataccagagactgggcaatttacaaaagaaagaggtttaattggacttacagttccacatggctggggaagcctcacaatcatggcggaaggcaaggaagagcaagtcacatcttaaatggatggcagtaggcagagagagcttgtgcaggggaaggcctctttataaaaccatcagatcttgtgagacttactatcacaagaacagcatgggaaagacttgtccccatgattcaattacctcccactgggtccttcccataacacatggaaattcaagatgaaatttaggtggggacacagccaaaccatatcattccacccctggcccctccaaaatctcatgtcctcacatttcaaaaccaatcatgccttcccaacagtctcccaaagtcgtaactcatttcagcattaactcaaaagtccacagtccaacatctcatctgagacaaggcaagtcccttctgcctatgagcctgtaaaatcaaaagcaagttagttacttcccagatacaatgtgggtacaggcattgggctaatacagccatcgcagatgggagaaattggcccaaatgaaggggctacaggccctatgcaagtctgaaatccagtgaggcagtcaaatctttttttttttttttttttgagatggagtctcgctctgttgcccaggctggagtgcagtggcatgatctcggctcactgcaagctccacctcccgggttcacgccattctcctgcctcagcctcccgagcagctgagactataggcacccgccaccatgcccggctaattttttgcatttttttagtagaggcagggtttcaccatgttagccagggtggtcttgatctcccaacctcgtgatcttccccccttggcctcccaaagtgctgggattacaggcgtgagccactgcacctggcccagcagtcaaatcttaaagctccaaaatgatctcctctgactccatgtctctcatccaggtcatgctgatgcaagagctgggttcccatcatattgagcagctctgcccctgtggctttgcagggtacagcctccctctcagctgccttcacaggctggcattgagtgtctgtggcttttctaggtgcatggtgcaagctctcagtagatctaccattctggggtctggaggatggtggccctcttctcacagctccactaggtggtgctgcaatagggactctgtgtgggggctctgaccccacatttcccttctgcactgccctagcagaggttctccatgagggccccaaccctgcgcaaacttctgcctgggcatccaggcatttccatacatctgaaatctagcggaggttcctaaacctcaattcttgacttctgtgcaccctcaggctcaacaccatgtggaagctgccaaggcttgatgcttgcaccctctgaagcaacagcctgagctgtaccttggccccttttagtcacagctggagcagctgggaagcaaggcaccaagtccctagactgtacatagcagagggaccctgagcccagctcatgaaaccattttttccttgtaaacctctgggcctgtgatgggaaggactgctgcaaaggtctctgacattccccagagacattttcctcattgtcttggtgattaacatctggctccccattacttacacaaatttctgcagcccacttgaatttttcctcagaaaatgggattttcttttctattccatggtcaggctgcaaattttccaaacttttatgctctccttcccttataaaactgaatgcctttaacagcacccaaatcacattttgaatgctttgctgcttaaacatttcttccgccagataccctaaatcatatctctcaagttcaaagttccacaaatctctagggcaggggcaaaatgccaccagtctctttgctaaaacataacaagactcacctttgctcagttcccaacaagttcctcatctccatttgagacctcctcagcctggatttcattgtccatatcattatcagcattttggtcagaggcattcaacaaatctctaaggagttccaaactttcccacattttcctgtcatcttctgagctctccaacctattccaacctttgcctgttaaccagttccaaagtcacttccacgtttttgggtatctttcagcagcaccccattcctagtaccaatttactgtattagtccattttcatgctgctgataaaagacatacccaagactaggcaatttacaaaagaagaggtttaattggacttacagttccacatggctggggaagcctcacaatcacggcggaaggcaaggaagagcaagtcacatcttaaatagatggcagcaggcaaagagagagagagcttgtgcagggggactcttctttataaaaccataagatctcatgagacttattcactatcataagaacagcacaagaaagacttgtctccatgattcagttacctcccactgggtccctcccgcaacacatgggaattcaagatgagatttgggtgggggcacagccaaaccatataacctagtaatcatggtgactctgtaagataattgccggtggaatttttcatctcctcaggagcactggctgaatattgattcattgacaatgataaaaagacccattgttgttaaaagtgatgaaaacagaaattgctctatcttcaagtgtatctctgaaactactagggtacataaaaagatgagacaagttaaaagaatgtagacctgaaaagagaattctgactttttctcttggcaaataggtattaagcttcccaaactgttgattctgtaccatcagaaatgtaaaatactcaaaataaagttttctagtttcattcttagctaagcaggaacttgtgaaagttagtcttaaatgtgtttctatctctttggatgtattaactctttctgatggaacagatttccaccaagttggtgcagtaagaattaatttaccaatgcttagaaatgtatcacaaacactctgtagagacaaagccatggctattaagcataaattaaaaattcaggatttcttagtctcctttgaggaatggcatgaccaagatccagttgtacgtttcagctctcgtcatacgacctgttcacaagttaatctctagtcttaccatccaatttgtgtggcttgatgtcatgccttttcagcagcaatcctgtctctttcaaatgttcttggtgggctgtgtcaatcttcagatgaaaaagtaagcgtgccccacctcaacaccaaagatatggtgttggtgattcagtaagtggcacatttctctccgagtcagatccatagacattaaactgtcaacaacagcagcttttggtatgagttcagtgttctgaccagtagccatcatctggggatgcagatgtgcctcgtaacttgaagaaactggaatttatgaacttgcacttgccagaggcatagtccttcccactcttctacctggccctttttcagactactgtgttatgacacatccctgggttcttctccattttactctgtgattcctgcagtgatttctaaagcagtctagtttcctcccagaaagaagagtgctgtggatacaaaaaacattttggtttttaagagttatgttaggttgattaccaattagagtatgaaaaaagactaatttgtataccgttttttccccaacaccttcacatattaatggtatgcatgttttcaggttaccgattttgtgttgtttgaaaacatttcttaagggtctttcctttccttttgaagctaggaaataggaaaattcaaaaaataactatatttaattgccaaagcctgtatttggaagctgaagttaaatagttctttaatgcacaacagacttcttactccattccatagcaggataaattttgttgctatgagcaacagaagtccagaacaaatattagaattgatgatttaagtgttcacaaaattacagatttttaagaaaattgcataaagtgaagttaattgtagttttaagtttaaatcaccaaatgacctcaatgttagcattggtatgaaaaaactttactgatcttcatctgccagaaagttgcacattgttttctatataatgctatatagatcatgatataccctgaacaaaatattaatatctcagtattagaatgtaatttgcattgatccacaatagtgaaatatgaaaaaatgtatattctctgaggatatacatgtaatttctgtaaaagtaaaatacattttacctacagaataactttcttaattgaggggccttcacaatgacatgaaatctataataaagtaaagtagagaaaatagatatctgagagcccaattatccagactgacaatctatactgatgaaatttgtgagaaaaatacagtaattgaagaggaatatatatcctttttaagagataaaatactagaaaaaatacaaaggttattgcataatgagaattactgttcttttataactcaatcttaaaactgttatgcaacctataggtattacaggtttaagatcaaatttaggcctggcacaatggctcatgcctgtaatcccagcactttgggaggccaaggcaggtggatcacttgaggtcaggagtttgagacaagcctggccaacatggcgaaaccccatctctactaaaaatacaaaaattagccgggcatggtgatgcacacctgtaatcacagccaacttgggaggctgaggcaggagaattgcttggacccgggaggtggacattgcagtgaatcaagatcacgccactgcactccagcctaggcgacacagtgagattccatctcaaaaaaataaaaaataaaaagatcaaatttaattttaacttttcactatttggatgtttcttttttttctgaaatagtcaacattgatacttacatcatgtctgtttttaattctcagaagtggtataagcaaaagcacttttggattcctattgagcaagctccctcaaaagccaaaactgaaaaatcaatgtactgtaaaagaataaacaacccagtaaacagagcatggggaaatggtcataaggttcaaatctaaaattaggagtggactagtattgtgaggccgatgcataaggaagggagagttggggtgagaggaggtgctggggggatgtgaggagaacttggctcatgtgcttatttctttccttattgtgtactaaggctactagagattaggagggattctaaagaccatctaatccaatcttcttattttacagaggaggaaagtgatgcctagagaagttaaaggacttgattgaaaatacaagttagttagggatcaaggcgatattagaagctaggtttcttggcccttcagagatcctcacagatgtcaagtttggatagtcaactcttggaaaggtcatctggtctattttccttagggagtaaatagttcataaagttaaaccatattctgtatttcagttcctagtctggattttccccagtcctagttctctagttcttatttagattttgtaaatgtcattgaattatatttttattgtaagctatctgaaaaagttccatttgttcattaatttagcaaatacttattgatgacttactatgtgccaagcactgatacagcagtagacagaatagatgaatatcttcacaaacatgctgttgacagtctggtgaaataaagtgatatgtatatatgaatcatctgtatttgggcatagtagagcacaggaatgcatgaggtgcttttatttttcacattatagctagagttgctgtatctagtgacttgagaaatccttttttgtgatggtacttgtagccctagagtcagttttgtaaaaaatatattttagttttacaatggtattagacttacagaaaagttataaagatgacacagagagtatctatatactccacactgagtttcacttttattaacatcctacattagtttggtgcacctgtcgcaactaatgaacccatactgatatgttattattagctaaagtccatactttattcatgtttccttagtttttcctaatattctttttctgttccaggataccatatttagtcatcatgtctccttagtttcctccagactgtgacagtttcttagactttccttatttttgattactttgatagtttgaggagtactgttgaggtattttttagaatgtccttcaacttgcttgattttttttttcctttttttttttttttttttttttgagacaggttcttgctctgtctcccaggctggagggcagtggtgtgatcatagatcaccacaatcttgaattcttgggctcaagcgatcctcctaccttggcctcccaagtaggtgggactacagatgcatgccaccatactctactaatttgtttttatttttagtagagatgaggtctcactatattgcccaaattggtctcgaactcctgggctcaagaatcctcctgccttggcctcccaaagtgctgggatgacaagtgtgagccattgcacctgacctgatgtttttttcatggccagatagggatttgagtgtttgagaggaagactatagaagtaaagtaccatttttgtggcatataatggtatatgttatcttcatgactgataactcatgatataatccttgcttacctggctgaggtagtatttgtgtccactgtaaagttactctttcacttcctttccatactatactgtttggaaggaagtcaccatgcatagtccacacttaagagatggagatgatggttatgctccacctccttgaggggtagtatctacataaatcgtcattcttttgcctgggaaatgtgttcattttcctccatttatttatttattcaatcatttatatcaatatgtattcacagatatttattttatactttgagttacaatccaatactacattatttattttgttgctcaaatagttccagctttggccattgggagctctttcagttggctcctgtgccctcctctttgacatactctcaacaatgcatttattttaagtacttcattactttttggcctacaagatgctccaggctcattttgtatattccctactccaccctagaatgagccatttctccaaagagcattggtttcttttattagagaatggtattagaaaccacaaactggaatgctgggtgtgcttgttgctactgaagtatctttgcttctaagccctctaagcttaagctgacagagcaagaaatggtggtacatactagcctgggtatatacatgtatttataaatatttctatatttggccatctgtatcaatattaatatgaggcagagcatggtggctcacatctgtaatcccagcactttgggaggctgaggcgggtggaccacgacgtcaggagttcgagaccagcctgaccaacatggtgaaaccctgtctttactaaaaatacaaaaattagccaggtgtggtggtgcgcacctgtaatcccagctactcaggaggctgaggcaggagaatcacttcaacctgggaggcagaggttgcagtgagcctagatcgtgccactgcactccagcctgggtgacagagggagactctgtctcaaaacaaaacaaaacaaaacaaaaacatctaaatatgagttcattcatactgatatctccaaccttaatccatcaataacaaatgaatattttagcagtcccccccacttgcttgtgtgtaacctgccacccccaacagtgagaaacatggctcccgccatctcctgggatcagtttttcattatgtagaaatatctcacataaccttattttctttttgaaattccaaagtaaattaactatccagacaaaaaacaaacttttaaaagtgttgattatgctttttcatgctacattagagtctgctctattcaaatactccctacaaggggtcaaactgccagcactatctttaacattattagcatcattatcaatatcaataaatggttattgggcccctcttatagaaccataaactaagctggtttatgtggacagcctccaggggaaccttgaggtgttgccccatcactaacacatgacaaatttatatcactatcatatgtatacatctacatttcttttttaggtttataccttttagacctgagaatacttgtttactggcattattgtatataacacacttcctggtattccaaataaattagtactttttaatttctagttctgtggttattagcattagcaaaaaagaaggaaaaaagttaaatgatgtgtctgttgcatagtaggtgctcagtaaatactgtctccatttggatgtctgatattcctctcaaactcaacacatacaaaactgaattattaaccttttcctataaaatctgttcctactcatagccctccccaccgcatttgatggcaagtttatcattctagaacagaaacttcagtgccattcttaattcccctgtttttctcataccatgcaaccaatccatcaggaaaccctattaagtctaccttcaaaatatgtacaaaagcagacacctccttaccatttctactgctacctccatgatctgaaccttcattctctctgcctgtattactgaataaccctttaactggtctaagtctgcttttggccctctgtagtcttggcagcgagaataatcctacaaaaagatgtcagatcatgttatttttctgctgaaaagactccagtggctctccattttcttagaataagagccaaatatttacaatagcctacaaaactatgaggtctgccccctctcccatcccattacctctctgatctcatttcctgctactcttcccacattggcctacttgctacccctcaaatactctggatatgatcctgttgtaaggcttttgcactggcttttcctctgatgggaatgctcttctctgatagctggatggttaacgccttcatctccttcaagcatttgctcaaatgtcactttctcaatggagcctactgtgaccatgctatttaatattgcacctagcttctaccactcaccattcctagtccctcttaccctgttcaggtttacatttttctaagttttcttatattctaacatagaatataatttattcacttaagcttattgcttattgtgtgtctcccccagctagaatttgagtggcataaaggcagggatcttgttcagttttgttcattgatgtgtcttagatgcctagaagaaaaaaatatatagattgaatgagtaagtgtattatttaaactctatgcttcctgtacctctaaattattcttcaattttaaaaaagcaacacataaacaaaaacttaatttgatataaaggtatcaagtagatgtaagggcaaaaggtatccaaaatctgaaatgttaccaaaagcactgagttttaaattcctcatttgttaatgagtataataatgttaaaatattgttgtgacttttaaagtatatgcataaaagcagtcaataatcatgcattaagggatttctcagctcttaggcctatataaaataaggctttggaaacaaggtacaagttgttataagcccttagaagccactttctttgtggtggcattcctctgaagacccctttttatccgaagtttgaaatggtgagcaaacactgataataggaaaacagttctttaaatatgtttataaagattaataaaattataatgcaccagtttttaataggcacactgagatcacagtcactgaagatgacttggaaactcagaatggagacaattgaaaattgtacatatgttgctctgttagacatctacttttcttgaccactaaattttggccctactactcatttttttaaaaaaatgcagtttgttttcaagagcaaaacagttgtttagtaaatttgcattgctgaacattcagcacagatgtaagtttccttccctccactgttttttttcaaaagtagaaataacttttgtaataaataaataagtaaattaattaattaataagctgtgggttctatcatgtatccacttagtccctggtactgtttcttttctctgaaatattaggaactggctgaaaaggcaaatgttattggaatagttagtattctagtatgccaagcattgtagggagtgccagctagcaaggtggggcatccgggaagctgatagaacaccaacaaatgaacatatgactaaatgctgttgtttaaatttacctctggggaatcagtctatgaagttccatggtgacctttcatgttgtctttatggttactatgaattttcctttcactctttgtttcccttctgcttctattcttgatcataaacctggaatagagaaaagggaagatttttttttcttttatcagtggcaatgaagatgacagaataaagtaacaggttaacttcagttcacacgagaggggtactaaatttcactagaggtagagtaaaagtattggatttggaatatattggtctatattactctaagtttaggtgtttcactcttatcacatttgaatctttatgaacagcacaagacagtcctgtgtttcatatagctgggtcctgtcaatgtgtgcttctctgtaaggctgtgatttatttgcatcatgaagaattgagtttctttatgagtaacgtattacataataggcaaattagttaagtttgtatttcagtttttaaaaatccatttaacagtggtcaaaatattaaaaccaagtaaatatccagtaaaattcttatctctagaagattacaggatctaataccacacccttactttagatggctgagacacattagtcacttttagttctttcccaggctttactttacatttttgttattatgccagctcttttccttgttttgccaattaatttatgtttttgtcacagtttgtgccattgtttgccttatcttagaaccaaggaatctgggaaaaggttcaagtctttttaatgtgggcttttccaaacctgaagtttcctagatatgagtatatagaaataaactggaatgtggtattaatacaaaaccatatatttatgtctctgtatacatcttatatttatgtgtttagataaaatttacatgtgttttctatataagtttatcattcgattgatatatatacacataattataatgtaaaaatgatttttccttttgaagtgaataaattaatttttcccctttgaggtcagtaagtatcttcagtgctaccctgtgaagttgctttttgaacaatttatcttttttttttttttgttttgttttgttttgtttttttgagacggagtctcgctgtgtctcccaggttggagtgcagtggcgcgatctcggctcactgcaagctccgcctcccaggttcatgccattctcctgcctcagcctcccaagtagctgggactacaggcgcccgccaacacgcccggctaattttttgtatttttagtagaaacggggtttcaccgtgttagccaagatggtctcgatctcctgacctcgtgatccgcccgtctcggcctcccaaagtgctaggattacaggcgtgagccaccgcgcccggccgaacatttatcttaaataatgtggtagctattaaattccattacttggagtattatttccaggtctttttgaaagccagctatccttttttttttttttttgataaatagttgaattgaaattaaaaggcaaagtccctccctcctgaaagagactgccagaaatcagtatgatacttacttattcctcattgtctaacagtgtttggagattgttaatcatatgtaatataatgttccaatattatttttggcattatataccaatagctattttctgtacaataaactattcattattatgccttaaaaaacattagccacttaaaactttttgttaaaatttggggaattaactcttcttgtgagtaaagtattaacaaacctccttctgtatggaaagattacaatgggttagccttctactgctgcttctgataaaagtaaaaatgatccctgattggtaacctaccttgggactgggaagagtgtggatggatcataaatactgctgggagctatagctttgggcttcccatagcatatttcttcttactgggtatgtccctccttgtgtttaacacctgacctgtctgttttggagctggagaattgtctctgaactcctactgaagagacatacttgatgctgtcctgctgacatgctgtgttcctggcctgcatccttcttcagaactagtctgtgtcacattttggcccattgaatcttgttagtttgattgccctgctgaacccaacatcactgctgctggttgagcagaataggcattatactatcataaatatttaatatgaaaagtgtaataataataatgataataataacaggtaattcttcctttatttttcagaaatgtgttacggatgagtgtttcttttttgaacgattggaatctaataactacaatacttaccggtcaaggaaatacaccagttggtatgtggcactgaaacgaactgggcagtataaacttggatccaaaacaggacctgggcagaaagctatactttttcttccaatgtctgctaagagctgattttaatggccacatctaatctcatttcacatgaaagaagaagtatattttagaaatttgttaatgagagtaaaagaaaataaatgtgtatagctcagtttggataattggtcaaacaattttttatccagtagtaaaatatgtaaccattgtcccagtaaagaaaaataacaaaagttgtaaaatgtatattctcccttttatattgcatctgctgttacccagtgaagcttacctagagcaatgatctttttcacgcatttgctttattcgaaaagaggcttttaaaatgtgcatgtttagaaacaaaatttcttcatggaaatcatatacattagaaaatcacagtcagatgtttaatcaatccaaaatgtccactatttcttatgtcattcgttagtctacatgtttctaaacatataaatgtgaatttaatcaattcctttcatagttttataattctctggcagttccttatgatagagtttataaaacagtcctgtgtaaactgctggaagttcttccacagtcaggtcaattttgtcaaacccttctctgtacccatacagcagcagcctagcaactctgctggtgatgggagttgtattttcagtcttcgccaggtcattgagatccatccactcacatcttaagcattcttcctggcaaaaatttatggtgaatgaatatggctttaggcggcagatgatatacatatctgacttcccaaaagctccaggatttgtgtgctgttgccgaatactcaggacggacctgaattctgattttataccagtctcttcaaaaacttctcgaaccgctgtgtctcctacgtaaaaaaagagatgtacaaatcaataataattacacttttagaaactgtatcatcaaagattttcagttaaagtagcattatgtaaaggctcaaaacattaccctaacaaagtaaagttttcaatacaaattctttgccttgtggatatcaagaaatcccaaaatattttcttaccactgtaaattcaagaagcttttgaaatgctgaatatttctttggctgctacttggaggcttatctacctgtacatttttggggtcagctctttttaacttcttgctgctctttttcccaaaaggtaaaaatatagattgaaaagttaaaacattttgcatggctgcagttcctttgtttcttgagataagattccaaagaacttagattcatttcttcaacaccgaaatgctggaggtgtttgatcagttttcaagaaacttggaatataaataattttataattcaacaaaggttttcacattttataaggttgatttttcaattaaatgcaaatttgtgtggcaggatttttattgccattaacatatttttgtggctgctttttctacacatccagatggtccctctaactgggctttctctaattttgtgatgttctgtcattgtctcccaaagtatttaggagaagccctttaaaaagctgccttcctctaccactttgctggaaagcttcacaattgtcacagacaaagatttttgttccaatactcgttttgcctctatttttcttgtttgtcaaatagtaaatgatatttgcccttgcagtaattctactggtgaaaaacatgcaaagaagaggaagtcacagaaacatgtctcaattcccatgtgctgtgactgtagactgtcttaccatagactgtcttacccatcccctggatatgctcttgttttttccctctaatagctatggaaagatgcatagaaagagtataatgttttaaaacataaggcatttgtctgccatttttcaattacatgctgacttcccttacaattgagatttgcccataggttaaacatggttagaaacaactgaaagcataaaagaaaaatctaggccgggtgcagtggctcatgcctatattccctgcactttgggaggccaaagcaggaggatcgcttgagcccaggagttcaagaccaacctggtgaaaccccgtctctacaaaaaaacacaaaaaatagccaggcatggtggcgtgtacatgtggtctcagatacttgggaggctgaggtgggagggttgatcacttgaggctgagaggtcaaggttgcagtgagccataatcgtgccactgcagtccagcctaggcaacagagtgagactttgtctcaaaaaaagagaaattttccttaataagaaaagtaatttttactctgatgtgcaatacatttgttattaaatttattatttaagatggtagcactagtcttaaattgtataaaatatcccctaacatgtttaaatgtccatttttattcattatgctttgaaaaataattatggggaaatacatgtttgttattaaatttattattaaagatagtagcactagtcttaaatttgatataacatctcctaacttgtttaaatgtccatttttattctttatgtttgaaaataaattatggggatcctatttagctcttagtaccactaatcaaaagttcggcatgtagctcatgatctatgctgtttctatgtcgtggaagcactggatgggggtagtgagcaaatctgccctgctcagcagtcaccatagcagctgactgaaaatcagcactgcctgagtagttttgatcagtttaacttgaatcactaactgactgaaaattgaatgggcaaataagtgcttttgtctccagagtatgcgggagacccttccacctcaagatggatatttcttccccaaggatttcaagatgaattgaaatttttaatcaagatagtgtgctttattctgttgtattttttattattttaatatactgtaagccaaactgaaataacatttgctgttttataggtttgaagaacataggaaaaactaagaggttttgtttttatttttgctgatgaagagatatgtttaaatatgttgtattgttttgtttagttacaggacaataatgaaatggagtttatatttgttatttctattttgttatatttaataatagaattagattgaaataaaatataatgggaaataatctgcagaatgtgggttttcctggtgtttccctctgactctagtgcactgatgatctctgataaggctcagctgctttatagttctctggctaatgcagcagatactcttcctgccagtggtaatacgattttttaagaaggcagtttgtcaattttaatcttgtggatacctttatactcttagggtattattttatacaaaagccttgaggattgcattctattttctatatgaccctcttgatatttaaaaaacactatggataacaattcttcatttacctagtattatgaaagaatgaaggagttcaaacaaatgtgtttcccagttaactagggtttactgtttgagccaatataaatgtttaactgtttgtgatggcagtattcctaaagtacattgcatgttttcctaaatacagagtttaaataatttcagtaattcttagatgattcagcttcatcattaagaatatcttttgttttatgttgagttagaaatgccttcatatagacatagtctttcagacctctactgtcagttttcatttctagctgctttcagggttttatgaattttcaggcaaagctttaatttacactaagcttaggaagtatggctaatgccaacggcagtttttttcttcttaattccacatgactgaggcatatatgatctctgggtaggtgagttgttgtgacaaccacaagcactttttttttttttaaagaaaaaaaggtagtgaatttttaatcatctggactttaagaaggattctggagtatacttaggcctgaaattatatatatttggcttggaaatgtgtttttcttcaattacatctacaagtaagtacagctgaaattcagaggacccataagagttcacatgaaaaaaatcaatttatttgaaaaggcaagatgcaggagagaggaagccttgcaaacctgcagactgctttttgcccaatatagattgggtaaggctgcaaaacataagcttaattagctcacatgctctgctctcacgtggcaccagtggatagtgtgagagaattaggctgtagaacaaatggccttctctttcagcattcacaccactacaaaatcatcttttatatcaacagaagaataagcataaactaagcaaaaggtcaataagtacctgaaaccaagattggctagagatatatcttaatgcaatccattttctgatggattgttacgagttggctatataatgtatgtatggtattttgatttgtgtaaaagttttaaaaatcaagctttaagtacatggacatttttaaataaaatatttaaagacaatttagaaaattgccttaatatcattgttggctaaatagaataggggacatgcatattaaggaaaaggtcatggagaaataatattggtatcaaacaaatacattgatttgtcatgatacacattgaatttgatccaatagtttaaggaataggtaggaaaatttggtttctatttttcgatttcctgtaaatcagtgacataaataattcttagcttattttatatttccttgtcttaaatactgagctcagtaagttgtgttaggggattatttctcagttgagactttcttatatgacattttactatgttttgactacctgactattaaaaataaatagtagatacaattttcataaagtgaagaattatataatcactgctttataactgactttattatatttatttcaaagttcatttaaaggctactattcatcctctgtgatggaatggtcaggaatttgttttctcatagtttaattccaacaacaatattagtcgtatccaaaataacctttaatgctaaactttactgatgtatatccaaagcttctcattttcagacagattaatccagaagcagtcataaacagaagaataggtggtatgttcctaatgatattatttctactaatggaataaactgtaatattagaaattatgctgctaattatatcagctctgaggtaatttctgaaatgttcagactcagtcggaacaaattggaaaatttaaatttttattcttagctataaagcaagaaagtaaacacattaatttcctcaacatttttaagccaattaaaaatataaaagatacacaccaatatcttcttcaggctctgacaggcctcctggaaacttccacatatttttcaactgcagtataaagtcagaaaataaagttaacataactttcactaacacacacatatgtagatttcacaaaatccacctataattggtcaaagtggttgagaatatattttttagtaattgcatgcaaaatttttctagcttccatcctttctccctcgtttcttctttttttgggggagctggtaactgatgaaatcttttcccaccttttctcttcaggaaatataagtggttttgtttggttaacgtgatacattctgtatgaatgaaacattggagggaaacatctactgaatttctgtaatttaaaatattttgctgctagttaactatgaacagatagaagaatcttacagatgctgctataaataagtagaaaatataaatttcatcactaaaatatgctattttaaaatctatttcctatattgtatttctaatcagatgtattactcttattatttctattgtatgtgttaatgattttatgtaaaaatgtaattgcttttcatgagtagtatgaataaaattgattagtttgtgttttcttgtctccca

SEQ ID NO: 30 - DNA, 1916 bp, Homo sapiens
acagagcccgggccgcaggcacctcctcgccagctcttccgctcctctcacagccgccagacccgcctgctgagccccatggcccgcgctgctctctccgccgcccccagcaatccccggctcctgcgagtggcactgctgctcctgctcctggtagccgctggccggcgcgcagcaggtgggtaccggcgccctggggtccccgggccggacgcggctggggtaggcacccagcgccgacagcctcgctcagtcagtgagtctcttcttccctaggagcgtccgtggccactgaactgcgctgccagtgcttgcagaccctgcagggaattcaccccaagaacatccaaagtgtgaacgtgaagtcccccggaccccactgcgcccaaaccgaagtcatgtaagtcccgccccgcgctgcctctgccaccgccggggtcccagaccctcctgctgccccaaccctgtccccagcccgacctcctgcctcacgagattcccttccctctgcagagccacactcaagaatgggcggaaagcttgcctcaatcctgcatcccccatagttaagaaaatcatcgaaaagatgctgaacaggtgagttatggtttccatgtacacaggcgactggagccgttggtcagaaatactggcatgtgccccctaaaaataaaatcaggaaaacccaggggttagttgaaggactagaaattgggattattgttttcacaattaaggtttcctttacgataattactgctctggtgccagaggatattcccaatgcctggcgtccccaccctggttcttccttcgttccaatgaatgtaggtaaaactgccttcatttgaggcccagtaggacaaacagcaacaggttctggctgtttttaatccaatagtacagtggagaccaccgccccaccccacccccattcctaaaagagcatcccaagcttagaggtccctgccacacagcacagctgtcataggcagtagccacttggttgccaggctggggaaactgcattcggaaaactctagaggctggaggagcagggcaggagaagagtgttgtgcaatcagctttcccgagcacctactcagggcacccattttctcattgcagtgacaaatccaactgaccagaagggaggaggaagctcactggtggctgttcctgaaggaggccctgcccttataggaacagaagaggaaagagagacacagctgcagaggccacctggattgtgcctaatgtgtttgagcatcgcttaggagaagtcttctatttatttatttattcattagttttgaagattctatgttaatattttaggtgtaaaataattaagggtatgattaactctacctgcacactgtcctattatattcattctttttgaaatgtcaaccccaagttagttcaatctggattcatatttaatttgaaggtagaatgttttcaaatgttctccagtcattatgttaatatttctgaggagcctgcaacatgccagccactgtgatagaggctggcggatccaagcaaatggccaatgagatcattgtgaaggcaggggaatgtatgtgcacatctgttttgtaactgtttagatgaatgtcagttgttatttattgaaatgatttcacagtgtgtggtcaacatttctcatgttgaaactttaagaactaaaatgttctaaatatcccttggacattttatgtctttcttgtaaggcatactgccttgtttaatggtagttttacagtgtttctggcttagaacaaaggggcttaattattgatgttttcatagagaatataaaaataaagcacttatagaaaaaactcgtttgatttttggggggaaacaagggctacctttactggaaaatctggtgatttatatcaata

SEQ ID NO: 31 - DNA, 3036 bp, Homo sapiens
acagtgctccggatcctccaatcttcgctcctccaatctccgctcctccacccagttcaggaacccgcgaccgctcgcagcgctctcttgaccactatgagcctcctgtccagccgcgcggcccgtgtccccggtccttcgagctccttgtgcgcgctgttggtgctgctgctgctgctgacgcagccagggcccatcgccagcggtgagagcgcatggcgcgcgggacgcactcgcactcgggcacagaggtgcatcccagcctctgcggggtcgctgcgttccagggaactctcccagcaacctgccctataaagggtgtctctctttcttccccagctggtcctgccgctgctgtgttgagagagctgcgttgcgtttgtttacagaccacgcaaggagttcatcccaaaatgatcagtaatctgcaagtgttcgccataggcccacagtgctccaaggtggaagtggtgtaagttctgtgctgctgtgtccgctgtgaccttggcaagagagaaatcccgcagcctgggtcttcaaccttggtatctcatgagtgtatcttctttttctttccttcagagcctccctgaagaacgggaaggaaatttgtcttgatccagaagccccttttctaaagaaagtcatccagaaaattttggacgggtacttgtcactttgatctttgtggtttctaaatctgatctagggagaccatagacttcacaaggtctttattctctgtacgatttaagtaacacttttcatgtttagaattaaaaggttgttgaattgggaaagtttttctggattgtcctgggaaaatataccaatcttacatgtaattacttgagcaattacacacagcttgtcactaagttatgttttttgtttacccattgcttttattgatttttgtattctccttttttaccaaacatcataaacgctgagttttgacaagggtggagtagaaaggagtgtgaaaaatggttaaactaatataacatttttctcaacagtggaaacaaggaaaactgattaagagaaatgagcacgcatggaaaagtttcccagtcttcagcagagaagttttctggaggtctctgaacccagggaagacaagaaggaaagattttgttgttgtttgtttatttgtttttccagtagttagctttcttcctggattcctcactttgaagagtgtgaggaaaacctatgtttgccgcttaagctttcagctcagctaatgaagtgtttagcatagtacctctgctatttgctgttattttatctgctatgctattgaagttttggcaattgactatagtgtgagccaggaatcactggctgttaatctttcaaagtgtcttgaattgtaggtgactattatatttccaagaaatattccttaagatattaactgagaaggctgtggatttaatgtggaaatgatgtttcataagaattctgttgatggaaatacactgttatcttcacttttataagaaataggaaatattttaatgtttcttggggaatatgttagagaatttccttactcttgattgtgggatactatttaattatttcactttagaaagctgagtgtttcacaccttatctatgtagaatatatttccttattcagaatttctaaaagtttaagttctatgagggctaatatcttatcttcctataattttagacattctttatctttttagtatggcaaactgccatcatttacttttaaactttgattttatatgctatttattaagtattttattaggagtaccataattctggtagctaaatatatattttagatagatgaagaagctagaaaacaggcaaattcctgactgctagtttatatagaaatgtattcttttagtttttaaagtaaaggcaaacttaacaatgacttgtactctgaaagttttggaaacgtattcaaacaatttgaatataaatttatcatttagttataaaaatatatagcgacatcctcgaggccctagcatttctccttggataggggaccagagagagcttggaatgttaaaaacaaaacaaaacaaaaaaaaacaaggagaagttgtccaagggatgtcaattttttatccctctgtatgggttagattttccaaaatcataatttgaagaaggccagcatttatggtagaatatataattatatataaggtggccacgctggggcaagttccctccccactcacagctttggcccctttcacagagtagaacctgggttagaggattgcagaagacgagcgggagcggggagggcagggaagatgcctgtcgggtttttagcacagttcatttcactgggattttgaagcatttctgtctgaatgtaaagcctgttctagtcctggtgggacacactggggttgggggtgggggaagatgcggtaatgaaaccggttagtcagtgttgtcttaatatccttgataatgctgtaaagtttatttttacaaatatttctgtttaagctatttcacctttgtttggaaatccttcccttttaaagagaaaatgtgacacttgtgaaaaggcttgtaggaaagctcctccctttttttctttaaacctttaaatgacaaacctaggtaattaatggttgtgaatttctatttttgctttgtttttaatgaacatttgtctttcagaataggattctgtgataatatttaaatggcaaaaacaaaacataattttgtgcaattaacaaagctactgcaagaaaaataaaacatttcttggtaaaaacgtatgtatttatatattatatatttatatataatatatattatatatttagcattgctgagctttttagatgcctattgtgtatcttttaaaggttttgaccattttgttatgagtaattacatatatattacattcactatattaaaattgtacttttttactatgtgtctcattggttcatagtctttattttgtcctttgaataaacattaaaagatttctaaacttca

SEQ ID NO: 32 - DNA, 2157 bp, Homo sapiens
cacagagcccgggccacaggcagctccttgccagctctcctcctcgcacagccgctcgaaccgcctgctgagccccatggcccgcgccacgctctccgccgcccccagcaatccccggctcctgcgggtggcgctgctgctcctgctcctggtggccgccagccggcgcgcagcaggtgggtcccggcgccctggggtccccgggccggacgcggctggggtgggcgccccgcgccgacagccccgctcaatcagcgagtctcttcttccctaggagcgcccctggccactgaactgcgctgccagtgcttgcagaccctgcagggaattcacctcaagaacatccaaagtgtgaaggtgaagtcccccggaccccactgcgcccaaaccgaagtcatgtaagtctcgcccatcgctgccgctgccactgctggggtccccgactctcccgctgccccaaaccctgtcctcagcccgacctcctgtctcacgagattcccttctctctgcagagccacactcaagaatgggcagaaagcttgtctcaaccccgcatcgcccatggttaagaaaatcatcgaaaagatgctgaaaaagtaagttataatttccatgtacacaggcgactggagctgttggtcagaaatactggcgtctgccccctaaaaagtaaatcaggaaaacccagggttagctgcaggactgaaaaaattattattttcacaaagttgccattaaggttattaatctgttctggtgccagaggatattcccagtgcccagggtcaccacccaggttcttccctcctgccagtgaatgtaggtaaaactgctttcatgtaaggtctcattggagtttgccagttgtgctgaagtgttttccacctgttaaaaaacacaagcttcatttcccctagttcctactgactttcagacctgaaaagcagaccccctggttttttgtaaaagtttagggttgaagtgcagagatttcacaataatattgcactgggtatataactggttgccaccacctattagccatgtcactcagagacaatattatttagtttatctgagactcagcaaaacagggaaaataatggtagctacatcatgaggttgctttgaggctcaagtgaggcccagtatgacaaagagcaataggctctggctgttttagccagtaaaacagtgtagactgccactcctccaccccacgtcacccccattcctaaaagagcatcccaagcctagaggtccttgccacacagcacagctgtcacaggcagtacccacttgggtgccaggctggggaaactgcattcagaaaactctagagcctggggaaacaggacaggagaagactgttgtgcagtcagctttcctgagcacctactcagggcacccattttctcattacagtggcaaatccaactgaccagaaggaaggaggaagcttattggtggctgttcctgaaggaggccctgcccttacaggaacagaagaggaaagagagacacagctgcagaggccacctggattgcgcctaatgtgtttgagcatcacttaggagaagtcttctatttatttatttatttatttatttgtttgttttagaagattctatgttaatattttatgtgtaaaataaggttatgattgaatctacttgcacactctcccattatatttattgtttattttaggtcaaacccaagttagttcaatcctgattcatatttaatttgaagatagaaggtttgcagatattctctagtcatttgttaatatttcttcgtgatgacatatcacatgtcagccactgtgatagaggctgaggaatccaagaaaatggccagtgagatcaatgtgacggcagggaaatgtatgtgtgtctattttgtaactgtaaagatgaatgtcagttgttatttattgaaatgatttcacagtgtgtggtcaacatttctcatgttgaagctttaagaactaaaatgttctaaatatcccttggacattttatgtctttcttgtaaggcatactgccttgtttaatgttaattatgcagtgtttccctctgtgttagagcagagaggtttcgatatttattgatgttttcacaaagaacaggaaaataaaatatttaaaaata

SEQ ID NO: 33 - DNA, 5341 bp, Homo sapiens
aacgctgtgacagccacacgccccaaggcctccaagatgagctacacgttggactcgctgggcaacccgtccgcctaccggcgggtaaccgagacccgctcgagcttcagccgcgtcagcggctccccgtccagtggcttccgctcgcagtcgtggtcccgcggctcgcccagcaccgtgtcctcctcctataagcgcagcatgctcgccccgcgcctcgcttacagctcggccatgctcagctccgccgagagcagccttgacttcagccagtcctcgtccctgctcaacggcggctccggacccggcggcgactacaagctgtcccgctccaacgagaaggagcagctgcaggggctgaacgaccgctttgccggctacatagagaaggtgcactacctggagcagcagaataaggagattgaggcggagatccaggcgctgcggcagaagcaggcctcgcacgcccagctgggcgacgcgtacgaccaggagatccgcgagctgcgcgccaccctggagatggtgaaccacgagaaggctcaggtgcagctggactcggaccacctggaggaagacatccaccggctcaaggagcgctttgaggaggaggcgcggttgcgcgacgacactgaggcggccatccgcgcgctgcgcaaagacatcgaggaggcgtcgctggtcaaggtggagctggacaagaaggtgcagtcgctgcaggatgaggtggccttcctgcggagcaaccacgaggaggaggtggccgaccttctggcccagatccaggcatcgcacatcacggtggagcgcaaagactacctgaagacagacatctcgacggcgctgaaggaaatccgctcccagctcgaaagccactcagaccagaatatgcaccaggccgaagagtggttcaaatgccgctacgccaagctcaccgaggcggccgagcagaacaaggaggccatccgctccgccaaggaagagatcgccgagtaccggcgccagctgcagtccaagagcatcgagctagagtcggtgcgcggcaccaaggagtccctggagcggcagctcagcgacatcgaggagcgccacaaccacgacctcagcagctaccaggtaggaaccgcggctgcgcggccagcctgcgccagcgccagcgccgcgcgcccccgacacttgggctcgtgcccaggcgccctctccgccgcgctccctggtggccgctcgctagagcacgcgcgccgcagacctagggtatttgcggatcagcgtcctcgcccatctcatcctccacactccgcccccacccacctgccccagctgctaagggtcttgacctttttcagaaacgtgcatcttttccagttctaattttgcacgcttgcacgtttaaagcaggagggatgaattcggtagtggataaatcagcaactttaggatagcttatgcagaaacgcgtgtattctctacttttccggcagtgatcggaagagctctcaaaattggcttcagcccaaagggctcagatgggaatggccaggtcagccatggagtttccccatgcatgtttgtgtcctgttgagacgtgttctaagtccactggtctccgtgcgtgatgtgcccaggaagtgtcctattgtcttactgatcttgtatgttcatttgagaatcgcttagatttaaaagaaaaagggggtgggacggggggctgggagtcaggtgtcagcgaggtttgcagaagtggagggagacgggaggaggccagggggaaggggtagcaagtggtttgcgaaggaagttgctgtttgcaaggatgagtctggggagattctctgtgtctgtttcaggacaccatccagcagctggaaaatgagcttcggggcacaaagtgggaaatggctcgtcatttgcgcgaataccaggacctcctcaacgtcaagatggctctggatatagaaatcgctgcgtacaggtacgatgcttactacgtgcgtggccggaacactaaccgcagtgcagaggctgttccggcagagcttccaccacttaagttaaagcaggcagggtgcaggcatcaactcagcacctggttatcttgcttacttaaaaagaaattattctaaagaattgcaagtgtagttttatctctttttatgcagctttaaaagaatgaatactagtagaaacaaaaggtttttgaattacacaaaggaggtgcagattaatctcaatgcacatgcttaaactttttatggaaaaatgttttcaaatgctggaagcatgaacagagttttggtttctaatatttcatctagtggtttcagcttttcaaatgtataatgtcaaggacaaacaccaggacgttctatttctctgtttctctgttatatagcttactattgccatcatctggctgagaatagatatagaatgatagaatatagatatagttcttttatatatgtagataatttatatgtattatattttatgctagactgtagtataaattatatcaatatatcatgtatgatattaatctagatctatagatacacatatgtgcatatgcatataaatctagatatatagacacaaatatatatgatcgttttatagatagtgagataggttataggtctattaactgaagtgaccttgctgttgactaagcgcaaaggacaaaatcgttgattaaaatttttctgctaccaataaggtagttataatataacgagaataaattgcatttacagagctatctctcttttcaggaaagctgaataactacattaaatagacactttatgataaaaattatcaacaaatttataactcgatacacctgaaaatctaaacgtttaagaaagtgactactctcagaaaggctgtttggctttggagtttgggggcgttttgtttatggctttttgtttttttgtttttgtttttgttttttgctatttggccactaacaagtttttcagcatattcatgttgtacctaatggatctctactgcagggccaagacttagtagctgggtgtggttagtggactattgggcaaggttagtcattgtagggggcaactgtctggcagtccaggagaatctttctctgtcactgagtataatgtaatatgccagtaagtgatagcaggtattatagtgaattcatagaatattctacttatgtaattctatttattcaaaggtagctaccacaatacccagaatgtaatgaagctcagaaggcctagtgaaatttttactatgtcttatgttcttggattttctccttagaaaactcctggagggtgaagagactagatttagcacatttgcaggaagcatcactgggccactgtatacacaccgacccccaatcacaatatccagtaagattcagaaacccaaggtggaagctcccaagcttaaggtccaacacaaatttgtcgaggagatcatagaggaaaccaaagtggaggatgagaagtcagaaatggaagaggccctgacagccattacagaggaattggccgtttccatgaaggaagagaagaaagaagcagcagaagaaaaggaagaggaacccgaagctgaagaagaagaagtagctgccaaaaagtctccagtgaaagcaactgcacctgaagttaaagaagaggaaggggaaaaggaggaagaagaaggccaggaagaagaggaggaagaagatgagggagctaagtcagaccaagccgaagagggaggatccgagaaggaaggctctagtgaaaaagaggaaggtgagcaggaagaaggagaaacagaagctgaagctgaaggagaggaagccgaagctaaagaggaaaagaaagtggaggaaaagagtgaggaagtggctaccaaggaggagctggtggcagatgccaaggtggaaaagccagaaaaagccaagtctcctgtgccaaaatcaccagtggaagagaaaggcaagtctcctgtgcccaagtcaccagtggaagagaaaggcaagtctcctgtgcccaagtcaccagtggaagagaaaggcaagtctcctgtgccgaaatcaccagtggaagagaaaggcaagtctcctgtgtcaaaatcaccagtggaagagaaagccaaatctcctgtgccaaaatcaccagtggaagaggcaaagtcaaaagcagaagtggggaaaggtgaacagaaagaggaagaagaaaaggaagtcaaggaagctcccaaggaagagaaggtagagaaaaaggaagagaaaccaaaggatgtgccagagaagaagaaagctgagtcccctgtaaaggaggaagctgtggcagaggtggtcaccatcaccaaatcggtaaaggtgcacttggagaaagagaccaaagaagaggggaagccactgcagcaggagaaagagaaggagaaagcgggaggagagggaggaagtgaggaggaagggagtgataaaggtgccaagggatccaggaaggaagacatagctgtcaatggggaggtagaaggaaaagaggaggtagagcaggagaccaaggaaaaaggcagtgggagggaagaggagaaaggcgttgtcaccaatggcctagacttgagcccagcagatgaaaagaaggggggtgataaaagtgaggagaaagtggtggtgaccaaaacggtagaaaaaatcaccagtgaggggggagatggtgctaccaaatacatcactaaatctgtaaccgtcactcaaaaggttgaagagcatgaagagacctttgaggagaaactagtgtctactaaaaaggtagaaaaagtcacttcacacgccatagtaaaggaagtcacccagagtgactaagatttgagtccattgcaaaaggttaagccatatgacaatttcaaaatgcatgtgattggcagcttcaaaacagaacgggttctcccatgggggctccagacattgtattttactttgtgcaatatgaggggactgcatgcaagctcagggtgctccctcctcagtctttgggggattcaaatgcatgatattgtatgtacctgggaaatttgccgatttcctaagctgttggaagggggtcacttaaggggggatgtcttgagatgtattatgcaaagtaccaactgagccaaaaacaataaacgaaacacagaactcagccttaagaaagctatatatgaataattatgtttacctcactggtgcatttaaaatggacttttgttcatgggagaacctcgttgacatgcacagtttgcaatcttatgttgatcgatgttaaacgtcacagcagtacttgctcaataaaggtcatattggaaacatagtcaa

SEQ ID NO: 34 - DNA, 6435 bp, Homo sapiens
aataaaaatcaatggtttccacatctctcagtgcctctatctggaggccaggtagggctggccttgggggagggggaggccagaatgactccaagagctacaggaaggcaggtcagagaccccactggacaaacagtggctggactctgcaccataacacacaatcaacaggggagtgagctggatccttatttctggtccctaagtgggtggtttgggcttactggggaggagctaaggccggagaggaggtactgaaggggagagtcctggacctttggcagcaaagggtgggacttctgcagtttctgtttccttgactggcagctcagcggggccctcccgcttggatgttccgggaaagtgatgtgggtaggacaggcggggcgagccgcaggtgccagaacacagattgtataaaaggctgggggctggtggggagcaggggaagggaatgtgaccaggtctaggtctggagtttcagcttggacactgagccaagcagacaagcaaagcaagccaggacacaccatcctgccccaggcccagcttctctcctgccttccaacgccatggggagcaatctcagcccccaactctgcctgatgccctttatcttgggcctcttgtctggaggtaagcgagggtaaccttcccttcctgctgtctccagcatccctccttggccttttggggccaggcttcatcagcctttctcttcaggtgtgaccaccactccatggtctttggcccggccccagggatcctgctctctggagggggtagagatcaaaggcggctccttccgacttctccaagagggccaggcactggagtacgtgtgtccttctggcttctacccgtaccctgtgcagacacgtacctgcagatctacggggtcctggagcaccctgaagactcaagaccaaaagactgtcaggaaggcagagtgcagaggtttgagggcaatgagtgtgggcagtggcctaaggcagaaacagggcaggcggcagcaaggtcaggactaggatgagactaggcagggtgacaaggtgggctgaccgggagtaggagcagttttagggtggcaggcggaaagggggcaagaaaaagcggagttaacccttactaagcatttaccctgggcttccaggcagccctggaagtcaagagaacactcagaaatggggagggagaagcagtggaaatccatatgggttgaggagtaggtaagatgctgcttctgcgggactgggaatgcgctgtttctcagtgacatggtctccgagaccaggagggatacacctaaggcagcctttccctcttgatgacttctacttgtccccccttctcaaagcaatccactgtccaagaccacacgacttcgagaacggggaatactggccccggtctccctactacaatgtgagtgatgagatctctttccactgctatgacggttacactctccggggctctgccaatcgcacctgccaagtgaatggccgatggagtgggcagacagcgatctgtgacaacggaggtgagaagcatcccctccccctacattgctgtctccctgacggcgcccagcccgaggagtgggcactcggctccggacactgtaactcttgctctctaccttgctcacggggcctcaggcttcagtgcttacctcgatgtctcatacctctgcagcggggtactgctccaacccgggcatccccattggcacaaggaaggtgggcagccagtaccgccttgaagacagcgtcacctaccactgcagccgggggcttaccctgcgtggctcccagcggcgaacgtgtcaggaaggtggctcttggagcgggacggagccttcctgccaaggtgacctttgacctgtacccccaggtcagatcctggtcttccatcctactgtcttctctccccacctcaaccctgctctttcctcactttgtttaaacctccctgtacaactatctcacttctgagccttttataccctggaaacccatgatcccccgtctctttggtcactgtatccctgacactcccagacatttgacctcatttctgactctcccagactccttcatgtacgacacccctcaagaggtggccgaagctttcctgtcttccctgacagagaccatagaaggagtcgatgctgaggatgggcacggcccaggtttgaagacagagaagggaggcagggcagggaactgggggaaaatggagaagggacagaactgttaatgctggagcctgagccactctcctggcacccaggggaacaacagaagcggaagatcgtcctggacccttcaggctccatgaacatctacctggtgctagatggatcagacagcattggggccagcaacttcacaggagccaaaaagtgtctagtcaacttaattgagaaggtggaatcctcctatccctgaactcgggggaatggaatctcgctgatcttccaggactagctccctgatcattccagcccctctgaacaacagggccccaggaaaatctccaggtcctattctgtcctccttcccttttacttgaagcagtttcttgactggtaattcctccatgaacctcagcccttgagcctcttactgagagcctccctgtcccagcaaagtcgctgaaatctcccaatcacagtattctattttcaatgccatggcgccttgttctcctcacccacaggtggcaagttatggtgtgaagccaagatatggtctagtgacatatgccacataccccaaaatttgggtcaaagtgtctgaagcagacagcagtaatgcagactgggtcacgaagcagctcaatgaaatcaattatgaaggtcagaggttagggaatggtgggaggttcactttggggtcaggaggttcagggtggagggggtcatgagactaccttgagggcgacagggaggaccactttgtagtcaaaagttgaacagcaggatcgttgggcaatggaggttagtgggaacctgttgggggctggaagggccactttgtggtcaaagggaagtccgtgtaatgatgattaacttaaaaagttgaaagatgtgggatttcagttgcagattggtctctggggttaaaagatggcttggaagaccaggtgaggtgatggtctcttccctctccacagaccacaagttgaagtcagggactaacaccaagaaggccctccaggcagtgtacagcatgatgagctggccagatgacgtccctcctgaaggctggaaccgcacccgccatgtcatcatcctcatgactgatggtcagaagggacctctctcctgtcccagcctccccaccttctcagaccagcatgtggcccttaagtccacttgtaacactatacccatggttggggccctgaatgtgactcatagctggctgttcatctctcctgtgacccttcataaggaattcttcctaagccctgtgatcaactatctctaacccttcctcaacttgctcaccctgccatgtgtatccctgcctttagccagtttatcttccttatctcctaccctcatggtcctgtctcttctgcaggattgcacaacatgggcggggacccaattactgtcattgatgagatccgggacttgctatacattggcaaggatcgcaaaaacccaagggaggattatctgggtgagtaacctgcctaggacccagcaccccacttcctcagggcttggaccctcatccttcctttttatccctcagatgtctatgtgtttggggtcgggcctttggtgaaccaagtgaacatcaatgctttggcttccaagaaagacaatgagcaacatgtgttcaaagtcaaggatatggaaaacctggaagatgttttctaccaaatgatcggtagggagatacaagggaataaagaacacaactctcctcaggttcccctgaagtaattcattcttcctctacacctgaagctctagttgcctggaaagccttcttcattcctccttctctacctcagtgtcactattcttgtttcctggcactgttcacttaaccttagaatcacagagctctgagcacttcagagatctttctatagtcctacatttgacacgtggaaacagaagccaaaggaggtcaagggacagcaagttagcaacaagggtgggcttgaaaacagccaggcctctgacagcttgatcccaagttctttcccttttcagtccaccatagcagttttctcctaacacgaggaaacaaatacccgtggtctttccctttctccttttgggcctttgctccccatagactcctacccaaaaggctgctgccatttgggaatgaagtgttccgagttttcagcacattctccttctctgccagatgaaagccagtctctgagtctctgtggcatggtttgggaacacaggaagggtaccgattaccacaagcaaccatggcaggccaagatctcagtcattgtaagcacagaatcccagtagtggggacttgggggaggtgaggtcaaggtgaaatgggagtaggggaaggaaaaaatggccataagagatggtggtttgtgaaagttgagctttccctctctactgttgtgtccccagcgcccttcaaagggacacgagagctgtatgggggctgtggtgtctgagtactttgtgctgacagcagcacattgtttcactgtggatgacaaggaacactcaatcaaggtcagcgtaggtaaggatgcaactgaaggtcctgggctgcacctatgctctccaggcaacacctcccactttctacagatcctacactccacccatcctcaatgcagccccattccttgcaccccagaccagtcagggatgggggaagacgtgaagttaggaatgacacggggccagaggcaggaagctgcccacaaagaggtggtacctactctcctacttcaggaggggagaagcgggacctggagatagaagtagtcctatttcaccccaactacaacattaatgggaaaaaagaagcaggaattcctgaattttatgactatgacgttgccctgatcaagctcaagaataagctgaaatatggccagactatcaggtgagagcgtccagatccctgaggaaaggctgggaaaggctggaggactggggtgaggagcaggcctggtttgctgttctccttgtcctttataggcccatttgtctcccctgcaccgagggaacaactcgagctttgaggcttcctccaactaccacttgccagcaacaaagtaagacatacttggcaagaggataaggatgagatcccaagagacaagtggggcatgagagggaggtgcaataggaagagatgatgcctggcccagaacctagctctagaagggcttaggggacatctactgagtgacaaaggcaatggggagatgacagtggtgggagcagctgaagtgacgcagtctattcgtccagaggaagagctgctccctgcacaggatatcaaagctctgtttgtgtctgaggaggagaaaaagctgactcggaaggaggtctacatcaagaatggggataaggtgagaaacgggcatcctaaggaggcactctaggccccaatccttcctaagccacttctgttcattacttctccatgcttcccacctcccctacagaaaggcagctgtgagagagatgctcaatatgccccaggctatgacaaagtcaaggacatctcagaggtggtcacccctcggttcctttgtactggaggagtgagtccctatgctgaccccaatacttgcagaggtgagagaatgctctttggttgtgctacaagtgcccaaggcccaacagtccttttctctacagcttctcctctccttgcaggtgattctggcggccccttgatagttcacaagagaagtcgtttcattcaagtgagtcctccctttcctatctggggagatgccaagtggtcagcatgggccccaaagcaggaaagctcaatgcatgtggctagtaattcgaggtaggcagagcctgcctcaccttaggaccgcatgtcttgcctgcgtgtgtcaagaacgaggctgagctgggtccctagtctgattcctttaggtcagctaagacacaagcaggaacagccatgcttccaggattaggaattctactgaatgatccatggcaccccactgcctctgcaggttggtgtaatcagctggggagtagtggatgtctgcaaaaaccagaagcggcaaaagcaggtacctgctcacgcccgagactttcacatcaacctctttcaagtgctgccctggctgaaggagaaactccaagatgaggatttgggttttctataaggggtttcctgctggacaggggcgtgggattgaattaaaacagctgcgacaaca

SEQ ID NO: 35 - DNA, 96059 bp, Homo sapiens
aagagtcttaaagacaggtctccgtattagaccttgtaatacgcttacctagatctgagaaggactttcaggatagaacatggtgagtaacataatgtcttgtgcctttactttcatttcgcttacttaccagggttggttgtaacttaatttcttttttaaaatgcataaagttctcatattaaaaagacatatataactgatcaggaactcagtaatattaacaattaagataaggttttatgtgttcccggtgagaaataagatagaacttgttgtaaatgtaataatgcatggtgtttcctttacattttttattttacagcttttgttagttagcccctttgtgcacatcagataaaataagctttggaaatgacacatttaactaagtgaatgttaccctatttgctttattacttctaaaaatcctataaataataactaaatgtaagtacttatatgaataattatgctttccctcttgggatattacagggttgaacaatcttgattaagcaatgagcagagccagcatccatttagtgtgttcctctgcaggggacatttttcaccgtgttcttcatggtgctatagaatcacatcaatggggagcataaaacattctaaaagaatgtatttctgaatataaagttactggactgttttatttaaacagtcaaatttcccaaacgagattgcaaaataaacttccctaggaataatttaagtgtgagcagttaaactatcctgcaaggaaggttcattttaaaagccagcagtagacaaaggtagactagatgcttacaggcgcagtgctgatatttcttgaatctgataacatttgctttctggcttaaccgcaaactccctgctgtgaaatgctgagaactttgttcttcttaggaatctcgatcaatgccctgtggcagagactcccagagtgtcctttcaagtggcactgcatgcacagacctgtccccacagtggaaggcctgaatcaggccttaacctaatgagcaaaaagcaaatatttgtggaatggatcaacgttaacaaactattttcagatatgatcttctcaacttttttagtgtattttttatatcagaattttaatgaatttttaaagtctagaagagaaaaacattatgccttttcattttctcttttccttttcactctgtctctctttctttgtgcctctgtcgctctctctctctctctttcctatgtgtacctctgcctctgtctcttttcctgtcactctctgtctctgtccccctttgtctatttctctcttttttgtcttgatctctcactgtgcctgtttttctgtctctctctctttctgtctccccttctgcttggtcctactgtctctccaagtatatatttaattatcattggcttccagtacaattctctcaatgaaatttgcagccattatacaatttcccaattttaatgacattaatgaggcatgaatgaggaagaaataataatttttaaacatgggaaattgactgttaaatatgactcctcctgttaaaggaacctaaagcacatagctgtcaaagagacctgtggcacagtgtagaagagacaggcaaagttcccatttatctcatcagtcaaagtccctgattcctcaaaagtcctgggggcctccttgtccaggtcgggggccaaggtagagaaggagtgagaaggggaaggcaaaggtgcttactaagtttttggccaactaaatacttcctgctgaggataaaaccttagacctcactttgttaacttttaaaaattgctctttaacactttactctttagctctttttctaaacactgctttcttgttaagatcagataatgatgaattattagaggaacacctattactcatagttgtactcccatctgtttggagttgtgacagtttggatctttcaaatatttatttcatgaaggataaagaccttagaacaaaaagaaatcacttttcacgtgtacatccacaagtcttaaagaaaaaaacaagaagaaaaaatgcttttctaatgaaattgcacagagcatgagtaaaaaatcaattatatttgaaaacatgaccaagattaaatatctccattgttttgaaacaaagacatcatatggggggaaaatattctagcggttgcaaagcacaatccaaacaaatgaatctcttgattaatctaagtatgtaaaaaaccttggatgacagtcacaaggggcaattagtacatagttaatggatcattgtgataagtaataaaaattagtcattctctgccattgctaatctgacatgtatgaattctgcaagaagaaaggatataggatgtaatgtagtcttaagcagtatagttaataaaatacatttgaaggcaaatgatccctttctcagttttcaattacatcttaaatttcaaatatggtgaaatgtttccttttgatgtgaataaatatagatatatagattacagccagatgactctcggacacagtgtatgctgacacactatattcagtatgctgttcagtatgttgtcattttttttcaatattagagaatatgttgtcattttcccccaaactctttacttagaaaggtgttcaaaaatcttctaggaagatagttcacattttttaaattacgaaaggcaaaacaattatagatattaaaataagagaaaaattgttcagcttaactttaagctataaaaatcaaattttatttataatgaaaagaaatacctaaaatcatttaacagaaaaaaatgagtagaaagattatcaactttaaagagtttaaggtagacaaattaaaacctgcctaaatatgggtgaaaacaataagatgaatttctaattagagagtgttctgtcacttgtttaaaagcaataaaaatatcaaaaaacataaccatgaacaacatgaacattaaggtataattagtctgagaggatcttgagctttacaggtaaaagccaaagtgtggattctgtatcggaagtccagtgctcagggatcaagtctcatctcaacttttctttttcttttttcttttttctttttattttttgagacagagtcttgctctgttgcccaggctaaagtgcagtagcacaatctctgctcactgcaacctctgcctcctgggttcaagtgattctcctgtctcagcctcccaagtagttgggattacaggcgcccaccaccacattcagctaatttttgtacttttagtagagatggggtttcgccacattggccaggctggtctcaaactcctgacctcaggtgatcttcctgccttggcctcccaaagtgctggcatctcaactttttattatcagcagagagcactaattaaaatcagagagctgagatcattcattattattcattattataattgaacagtcttccatttattttcatttgaggaattgagacagcatagttctttgtattgatgtttgttaatctggggataatcattgtgtagcctcccgtggttagatttagcacaactgattgattttaatagtaataatgtatgtttttttgaaagaatagtctctgatattgcttctattgctgaaaatttgatggaaatcagaattcattatactctttcctcttagttgctaatgatctgttgacaggagtagaaaaactagtattacaattatgcatatacctactgtgctaatggatagggaagctaagaaaggtgttcaaggacacagctctggcttctgctcttcatgctctgaatctcataaagctatgatgaaatgcacgtgtgataatgaggcatttttaccttttctagtttctgtggagccttgtaaggtctaaataaatgtggtggaatttaaatcttgtttgatattcaaaactcactggaaagcaagtagcaaaagtgattttcttataggacatgaatattattgtgtgttattatttaaaaccatctttcagctactttaccatggaaataatgagaacgaatccagcattaaagtttgaattgtttttgtacaagaccaggtttaagtttggtcattgcttgctaaactgcattcaaaattaatgcatagttataaaacaaaatttattacttcagaacaaaatcctggtatgcaaagatatctgataaattggctcaggctgtcctttacttccctttcaagcgggtgagcatctgcctggaggaactgatacagttagcaggaggctaaggatgggccaaggctggcacacctgtaatggatatgaaagcgatccgttactagtttcacctgaagcatattctcataaaaacaaacacacctggctgggcgcggtggcttgcgcctggaatcccagcactttgggaggccgaggcgggcggatcacgaggtcaggagatcgagaccatcctggctaacacggtgaaaccctatctctactaaaaatactaaaaattaggcgggcgtggtggtgggcgcctgtagtcccagctactcgggaggctgaggcaggagaatagcgtgaacctgggaggcggagcttgcagtgagccaagatcgcgccactgcactctagcctgggtgacagagcgagactccgtctcaaaaaaaaaaaaaaaaaaacgcacaaaaaacaccctcagctccacattttcatgattttcagcagaacaaccaacaattaataactaataacatgtataataacatttatgtcccataaaaatcgctttctctacaggctttccagtgagttttgaagattaaacaaaatttaaattctctcacatttatttggagcttactatctgccatgcaacactagaaaagtcaccttatagtgcaattgaggtgaaagttgcttgtaaatgcagtgtcttgtttaatcattatggacttttccttgaagaagggaagtgttatccttactttgtaggtaaggacagtggggctcagagtatttaaataatatgcccaaagacatatagtctgttaaacgtgagagacagatttgaatacacatcttttgactctaaacccaatcatccttccaatacacgtttgaaaaagcgaatttgtaatttggggtgctttgatgaaatttatcagtagaaatccacaatacaggaatattcccaaatagagctgaataaagactcagaacaaggatatgctcatttttctgcagaatgaaggaacattctatggaaaactaggtcctcttcgcaggggaagaaattcactaatatttcactaagcctctaagatgcatcaagagcaatatagcaacattgcaaaaatcctaggatgaccagttttcataacacttaagtattaggagcactcttagctactataatgtacaatctgttctcattttagagctggtgatcgacattcagggacaagcaaatgtagtgatagccctggtgacagacagaatcttagtctcctgactcctggttcaggaacttttttagattcagtcctcaaatgtcagttttgcatgaagaagaaatgcaggtgttctgatgtgattgagctgtagagaacctgtggtggcaaaaaactttactgctataaaacaaaaagacttcttagaaggaaataggtgatgaaagtcccctgatttgacacctttctcagaaatatgaagtggaaaaaaaaatagttacagctctgttgggtagttctttcttttggtttagccaaacgatgtgcagccaaaaatctctttcttgttctcaatttcccttgagccattactgtaaatgagagtggtgtgtaattttcctctcctccaatttcttccacactgtaatcaaaggtccttaagtacctgttgggtataggaatcttatttgctagaggaaataaatgaattaaaatgtgtaacatatcctttttttgaatatcattatcatattcttaacaacattgagcatttgcctcattttgcatagaaattatctgaaatcttttattgctgttttagctttgtgcttgtaaatttaggttagttttatagtcacgtgatctgctttactgttcctgtttctaggctaagtgaattcctttttcttttttaatatttatggagataaaatgactgatagggaactttaaggataaaacttcttgaacatacaaactggctattttatatattaagagtgatttagactgaatattaaagatattattagaaaaacataaccaaggttttatactaaaaatgttatagttctttacatttctttcttaccaataatagcaaggatctcaaaatgttgtccattatcatccacatattggcaacaaatatctcaagctttggaaactgcaaaaggccatgagaattgctaacagtaaaccaaaaatttttaaagagcattatgttttatttgttctcattgatttttttaaacagaattttaatacctttggggaggatatgtcttcacttactcaccacagcccctaccaccacttgtcaccaatttatgtcagcttcctgactctgcaggcattttcccactcttgactgaacgtattgctctttttcatcccctactcagccaaatcacagcaggaacgaatcctgctgtccattcgctcagtaaaacacacagactggcacttaaggcacgctgaatgctcacagctaaggacattcacttatttctgactctaaaagttaagtggtacgtttacccaggatcagctttgtttattcccccacgctatttatgacaattttacttttttgccattatatatttaaataaaatgtatataagccgatgatacatgagtaccaaaaggttaaaaaaaaacattgtttcagtacaagctagttttagcatcttggaaacatctagtaaaggttaagttaccaaatttgaattggatgatggtgagggcaaatacaaaaaaaaagtagttaattatcataaaaacctaaaagcattctgttttcagattgctttatgtcttaaaatttttgctcccttgtaaagaaaccaaaactagaattcaccaaggatttattgtgggccagaagacacatgtggacaaccactaatagatctctccttagaaaacagagcctagcaatgatgttcacctatgtattttcagtgacattaaattaatatggtattaatgtattattcttcatgagtcccagctttaactaatattttgattaactgactgcctacctgtaggtctcttatgtgatcaataagaaagcttttcatgtattcttaaatggtataatgtcatttctaaaaaattaatataagtacttttatatctgtaagcatgtgaatgtacacatatgtatggttttcagcctattactttatagaatctttattatttattatatatggatacaaggatagtaattttcatgatggtttagtacctgatgaggacattttatcctaaatgtattgaacctggttaacatttaatgttaatttagtaaagatagtgaaatgaaacagtttccaggaaggtattatgtgttgtaaattgtatgacccagaaagaaacacattttatttaaataaatatgccttgtcagcttctagtcctttctaccttaagttttcatgcatttgattgtatgtgaattacatttggacacctctcaatgtataacatagacttgagcaacataaatgtaaacaatagtataagaattcgttggtaattttttatataacattttcaaggtctgtaaaacctatgtgagtaaactttgagtatgactggtaatacgaacaccctgcccttgaatctgactttagaaatccaagtatattaaaagctgtcaccagaaatgtccaaaagctcataaaacttggttaacttccaaaagtaagtttatccttcaaagttgggttattttggaactatggattgtgtaaacttctgcttaaacaatcaaacagcttatgatcttcactgatgtgctgaaatgcatccaagaacagaggacatctttcggctaagtgaaacagaaagcaacagctgcttctttagcagtataggaattccttaaaaaagaggaaaaggaggaggagggaggaaaaaggagaagtaatcaaaagatggaaacaaagacatgtgtttgcttttagcttcagaggatgctcagccagttggatactcttacttctatgggttttttgtttgtttgtttgtttgtttgtttgtaatggagtttcattcttgttgcccaggctggagagcaatggtgtgatctcggctcactgcaacctccgcctccttggttcaagtgattctcctgcctcagcctcctgagtagctgggattacaggtgcacaccaccacacccagctaatttttgtatttttagtagagacaccatttctccattttggtcaggctggtctcgaactcctgacctcaggtgatccacctgcctcggcctcccaaagttctaggattacaggcgtgagccaccatggctggccacttctgtggtttttaattgtaaatcttttggttctcagaaattttatgtggctatagctagggaaagtagtgcacacctgtagtcccagctactcaagaggctgagggaggagaattgcttgagcccaggagtcccagctactcaggatcctgagggaggggaattgcttgagcccaagagttcagaactatagtgcactgtaatggtgcctgtgaacagccactgaactctagcttgggtaatatagtgagacatcgtctcaaaagaaagagagacagagagagggagagggagaagaagagggacggggagaaggaggaaggaagggagggaggcagaaaggaaggaagcaaggaaggaaagaaggaaggaaggaagggagggagggaggaaggaaggaaaataaactattggaaattataattatgcctgggatattgacttttctgattgtcactggttaatatttttacttcctggatagaataataacaaatgtaaaattctagcctaggaaaaggcaatttaggaaggaaatacaatgttcagtaaactaattaatgtctttgagaccatttccatcttgtctgtttccagtgcctctaagatattatttgtaaatcttaaactatacaatattaaatctggagatttccctttgcacatgccatttttggggtgtttactaccagagttcaaataatacaatgacattgcctaagaaatatagtgttatgatgttgtatctgtaatgtaaaaattttgtaggttagttttaaaatatattagtattaaaatatatcagtatctaattttattttatttcaaacttaaaatttcctctgtataattttcagttatgaacaacaatggaagatcatgactaggagtcagatggtttggtgtttaatcctagatcagtcattaattagccaagtcatttgttttctctggagttctgtttcctctactgtaaaatgatggcattataattcttagcgtgttctccacagtgtcagattctatcattccctgatactccaggactccatgtgtaatttcgcatatgcttggaaattagcattttaacggtaatttttgaaatagtgaaagaatataagacattttaaaaaccttactacaaatttctttattagttaaatatttaagccttcatgtttcagaaatggacacttattgcagtcactctatcagatggttatcacttggtttcctcttcaacatatttgcagaattgtgtaatatctccagcgttccatataaacaagatgggcagttttgcaattttgcatttttaaaacatagctctactagttggtggtccaactcctccagtcatccagaaaggcatttgctttcatctagtaactggctaccatggtggtaacagatgattttcaaacagctgtcacaagccgaaaacaacacaaaacaaaataaaaagccaccctccaacactatgtacagccagcttgccaatagctgaaatgaatctttcctggagcattttaacaaacttttttttttggttgttgttacaattaaacagaaatgcttgaaactcagacaaactggcttcgtgtttcccatgggcctaactcctaaattttctgatgggttctcagcaattggtggtttccagatgcatttaaaatgtgttaattgcctgcaggaattggcttttaaagcatacacaattcttcaaattcttcaatctcaagattctactgtaagtcccatgacatactatgtagtctgtataatatttgtccacagtttggtgcttaagttgcaccaaacttaagtgaaacttaataataaatttaaaaaatgagaaacaaattctgtcggaagtacagttttttttctcttttttttcattgtccattaccacttcccttgttaccctgaaaatcatagaaataatcataaactcctgttggagaaaaagctggcatgagcggtcttcctagaagaaagctgctggtgtcctggggtcagtaggcactcctggagaactcattcctagactggggttaattaaactacaaacatgtcagtctgacaactttaaccgttcatgctctatgtattagaatgtctagctttcttttacttgctcctggacaatttctccctgtcatgagattcttccttaactcactgagcctgtgtttacacccagtggtttacctttcattgaaactaggcagaaggcaggcttgtggtctgtcttctcaggtctggcagggctgaaaacaagacatgagaataaaaacatggcttttgatgaaaaatgcatttaacaggtggttttctcctttggtgactgacatagttaacttcccttgacgtacatctgagcctcatgtccttcatatttttttattttagattccatgtggatggctcatgaacaaaaatgagaaacacgacgataaactggtaatgttcaccaatcaatctgaagattctgaaaggtaataacagtttatttggagattatatgcttctaatactaatattctaattagagcacttctgctttgtggcaatgatagtgtattaagagtagaagagaagctgtctgaatggagctatatagaatagaaaaggaaaagatgacgggtaacagtatggcctatctatctgaacatattttcttttattgctatccagagggcaaaagtcatggtaggttatgaagataatttgatttttaaagtatttgtaaatttccattgacaagccttggtggatggtttttctgtaattgcacaaatttttctcctaggaaacaactgtattccaccagtaagttgaaggagttgctgtatcttttctcctgatttgcttaatccttagctcacctgaaggagggtgagaagtttactgagttccttatgaaaaaaaatcccttacttaggcgctttccacattctatcaatctttcaaagttttttttaaagcctccttctattcgttggttcagttatttctttttttttttttttaatgtggcacctaatacatgcaagatattgtgtttgttacttgcagaagaggaatcagattcagaccctatactcaagctgcttgaagtttagaagtgaaaagccatgcagatgcctaagcatcatatatggtaggatgctctgcctcataaaagaggcacagataaactgttcttggaaatctgaggaaagtgagatttccagagagtgggatagaaatacacgaagaagtgctttaacctaatttctggtaaagagaaacaggagaaagatggaaaaatagaaggaaaggctattccaagctgaaggcagaatgtgtacaaagacgtggtggtaggaaagtcacgtatttgtgtctggatcaactaacagtttgttttggcttccacaggtggtgtgtagtaaaaagaaggaaactcagttgatactctctcttgagtgagagactaaatagctgagaatttattctacaggccaatatttctgtttataaagacaaaacttctattttgtgatacctttcaagtgaaagataatttcaagaaataataatgatcaagttctcaagtcagtatttcttaaactagggttctgagatcctgtgtgtctggagtcatattctcagattctctatgagaacgttttcattaaaagaggcccatctgtactttcaatatgaaaatcatgacttgacaaggggtaccattaagaattttgagccaaggatttccaataggctactctaacaatagtgtttaaaattaattggaaagggaaaagatctgaatttcaaataaatatagaaatattgatttctcccattcacctcaatcaattacattcagtatctttaacaagcattttagccttcaattgtatataatttagcattttcctgtgcactatactttattattctagaactgtgttgggtgtgtaagtctctccttgtcaatatgattttacctacctcaacggaaagactcgacatgcagcagaatactcccctcaaagactgtgggtctacaataagcattgatctgttttatatacatttgaataaaatattagtaaaattgaaatttacatcacaggagtcatttaaggatgaagttattatactgacaacctctaagatactataggcattacagaagcaaaaaatatatgatgtgatgttgaacaacttctaggaaagatgatacccatcctcctttggtagcagaagcatatgcttggcaaaatttcaccgtgtagacaagaaagaaagaaggaagggaaaaagaaaggaagggagaaacctattatttctaagaggtaggggcaatcctcacccggccacctctccatattcacaagccatttccttctacatggagaattctgaggactttgtgtgagctcctgagtcccattctcttgcctcttctccacagccagcaatgcaatttactgtttagttctatttaacaatgatgaaaattatgtagaatttagtagttaacattttttctacagtggttaaaaatttgtatttctgaaagaaatagatagggttaggttctttaatagtaatctaaaatgttcagaagctggttttcaagttgccttctagggtgtatatacccggaagtgcagaaggaaggatgagggatgaggcagtgaggcaggggccgcggtccatgtctttgtctgagggaagtgggaaagaagaataaagacaagaggcgagagccaacaggacaggaagagaatagtgagcacctgagtcatctttccctctatcactcctgaactgactcctttctcattgaagtgctttcggtcctacgtattgatattatggttgccacaccaggtttcctttcaaaggaaaataaaggagcggaaggaatacttttgattgtcagtatgggggattatcaaagtaaacatgatgttttatagtttttatatttccctttaacacagttttgaagtatattgttattatgaaagcagtcccactcaacatgtatgatcctggggtcatcctttttttgaagtactcttgtaataccagttcctcattttaatattttaatttttctaaagcagatgctttcctgtggtaatattgtaagaagaatgtctttttttgttttttttttttttgagacggagtcttactctgtcgcccaggctgaagtgcagtggcacgatctcgactcactgcaagctccacctccagggttcatgccattctcctgcctcagcctccctagtagctgggactacaggcgcccgccaccacgcccggctaatttttttgtatttttagtagagatggtgtttcactgtgttagccagaatggtctcgatctcctgacctcatgatccacccgcctcggacttccaaagtgctgggattacaggcgtgagccaccgtgcctggctgaagaatgtctttttttaaaaaaaatggattatgcattcagaaaattataattataaccatgcaagaaaaatgactatgattcattttaatctgaagtagagctcatctcagaagaatgagatgactttgtgttctcatgaagtgacccttttacctggcattaaattcattcacaacagcagtcattcaacctaatattaaacaggatcgaatgccatcagtttttcatgccttctggtaatgatatggtggatttcagatgcacttaaggagctctgtgtctttcttcatattcaagtcattcaaacgtcctttatgtaaagcattggtggacattaagaaaattaaacaatacttttgtctttttttctccatgtgagtagcatactctcttccagatgcaacattgagcagccaaacagctgctggctattaaaagtcccttaaagctccatttttttttctcgtaaaaggaagagaagtgtaggaatgtttatggagtgacaggcagatgttttagttgtactatgtatgtgctaagtgaaaactaaaatgatctcttttatgatatcataggcattcttacaattcttttggcctctttatttttaacccccttcttacctgactctaaattaaactattctggaaaggcagaagaaagaatcatttatacagttgcggtaagttaagtttatctcacaccttttcataaagacagacatccctgaaaatgtatcttccgtccattcatattgttttgttaagtagaagagaaccttatagtttgaagagctaaataaaagtatttttcttttcactaaacaagcagcagcactgatgaataagtatttttaatgacaggcaaaacatcatagaccaatcataatttttttcataaattttactaatttatttgcaattcaaatttgttagtttttcagaaattacatgtcttcaaactaataaacatcaaagtcacattgggtttctggacaatagactaagtttcttctctttccacactaagaaagcagtctctcaatcttatttatttatatgtaatatattagatgaaattaagttttattggatggataaattcacagagatttgagacaaggagctttgggacaacttgtgctttgaaccaggctctgtaaagcacatttcagaaaagcctcttccatgcaaacaacgcccatgggataaacacagatttccatattttgaggcctaccttatccagaaggtccaagaagatatttagagtacaccttttgttctgtctgccttgaatactttatgcttgcataaactcttggattcaatgtagaaatcacttgtaaggctattactgtatgccagaaagtgtttgggagatgttgaaaagaataccaaattagaattttcccaagaatcaacttagcatttttctgggaagtactggtaccagcataaaatttgtgtgtctagagactggaaatcactcagcttttacttccatggaaatgtctttgataaaagctgtggtggcacagagcttgcttggaggtctgtaggaggccccaggcaggccacagacaacctgcagccagctgaatgaattttaaatctgtcctttctgtgtgtggtaactctaaggagttgctctctttttgcagaaggcttcagagtttatgctgaaaacatctctgagttgataattcaatatacagaccctccatggcagtacattccatttctgtggcttaaatttgaagcagtttcaaagccagttaatataatagaaggtattgcattagtaaaattctagttttcagggcaatttggaaataccaaattcacaactctctgtgctactctgacaggaatttgtgtaaatgcactaagtgaagaaataatgggggaaatgaagagactagagtttggaaaattcaatttggctttggtttgaatctttctgtttttattccttcacgtaaattgaaaatttaaatgtaatatcctcagtgagttgagttttcatcccttgtaggctttggcttgggatattacttatgtctctgttcaaatatgagtttagagagtaggcaggttacattgaggatttgttttgaatacctttttattcctctttttagtattttatatcatttgctagtatttatattgacataagactctagctgtcacttcatattctaaatattctgctctgttagttaaattggatcataattatttaaatcacacatcacccctctttccaagacaactgaactagagaatcacttttcagtttcacatctaggaaatatttctatgtcagggacatttctgctttccaagtccagttattttcattgttctaaccatgtaagttcctttattttctttatattaccagatcagggttttcaattatgacagaaaataccagcatactaaaatgcaaaataatatttattttaagatccaaaccatttgatgatttctcttttttgttttcattttttgctgtgctacatcatactttgttttagaacacaacagtgggactgaattgtgtccccctaaattcgtatgttgaactcctaaaccccaatgtgactgcatttggagatagggcccttaggaggtaattaaggttaagtgaagtcataagggtggggctctggtacaataggattagtgcccttataaaaagagacaccagagagcttgctgtctctctccacacatgcacaaagaagaggtcatttgagcacactgcaagccttgaaaagaggccttagaatgaaacctacctgctggcaccttgctcacaaacttcccagccttcagaactgtgagaaataaatacccattgtttacacccaatctatgctgtttccttatggcaactcaagaagactaagacactatttatgctactggtacttaataaggattttatttgcttttcttgttgatctataatgatttcagaggctgtgtgaaggagtttggcttaagcagctattaatatctaataaacatctagaagtccaggcaatatattagaagatattcccttaggggaccaccaatacttctgttattcaagatatcattactaaacctgattcaacttcaggctattaaaaaatgttccagaaaacaaggacttattttatctctatgtaatagtaatttttcctttctttattataaattataattcattaaaggatggtgaaataccttttcatccatgggctcagggcacctcatacctacccttttgagcaaaggtgatagcaaaagttcttatttatttagaagtgaagagcatccactatctcagtgacaccatttaaaatcagtattatggttaagagtgtggtttcttgagtcagactccctgagttcaaatcacgcttcttaggtaagtcatttactctaaaaccttaaaatacttcaaattttaataattttctcttttcttagaagcactcatgtaaaattcagcaaaactctatacattactagaaaaatgtgccaccaactagttttttacagtaagaaatataccataagaagtacgtagaatagttcttggcctgcagcaaacttcaataaatatttgttgagtgagtgaataaaagttgcataactaaaatgatcaataaaacatcaataaaataatataattgatatttatctcttcctatttggaataaaaaatagaagatcttgaatcttctgtatttgtttaatggagcttcagaggtacaaatatgtgtgatatttgccataactttattggtctgaatttacaaggctaatctggagcctaattatttcctctgggctcactgttccttctaggaataatgctgcttgcttgagttcatttaagcatccattatacccagtgtgacatcttttttctgaccacaaatgcgtagtttttttcccacaactctccatgccaactatgtgtccaataattcaatttggtgttgacactaccagaagttagtacagaccccacatgttaaggcctcagtcccacaagactgcccacacttcagaggccagttataagtccagtgaccacccatacttctgaccaacatgctacaaattcagaggttaccacaaccccatcctcaggtttggtaattcatgagaaggactcacagaactcaggaaacacatgttgccagtttattattaagatacaactcaggaacagccagatgaaaagaatccaaagggtgaggcatggggatgctgtcacacagcgtcctcgcccttaacaaacctgccatcttcccagcacatcaatgtgttaccaaccaggaagctttccaaatctccttgctcaagagtatttatatccatacagaacccagtagacataaattttttaagagtatttacatcccaatgtccagctccctccccttcctggagattggggagctccctccccttcctggagattggggaatggagctgaaagttcttaccttctaatcacaaatttgatctttctggcggccccaccctgaagctctccatggattccaccctgacagacttcattagcataacttaggtgtagtccagaggactgtatagttaaaataacaagagacagtcattcttatcgcttaagaaattccaagggtatcagaagctctgtgccaggaaccagagacaaagaatgtattttttattatatcacacccacttttaacagcccaatggattctccttgcctgttacctagacaaagccaacttatcaagacagaggaattgtaataaagaaaggatttatttcaggcatagccagctgaatgagagaccagttttattcttactcaaatctgtctccctgaaaattcagggatcagggctaaggataatttgatgagtaggggattgggacatgggtagtgctgattggttaggttggagatgaaatcatacagatttgaagctgccctcttgtgctgagtcagttcctgggtgggggccacaagaccagatgaatcagtttattgatctgggtggctccagccgacacattgagttcagggtctgtaaaatatctcttcctgggttttacaatagtgatgttatccctaggagcaactggggagatttcgaatcttgatgtctctggctgcatgactcctaaaccataatttctaattctgtggataatttattagtcctatagaggcagtctggtccccaggtagaagggggtttattttgggaaagggttgtatattagttcattttcatgctgctgataaagacatatctgagattgggaagaaaaagaagtttaattggacttacagttctgcaaggctggaaaggcctcagaatcatggcggccgcaagagaaaatgaggaagatgcaaaagcggaaacccctgataaaaccatcagatttcaggagacgtatttactaccacaagagcagtatgggggaaaccacccccatcattcatattatctcccactgggtagctcccataacacatgggaattatgggagtacaattcaagataagatttgggtgaggacacagccaaaccatatcaggttgttatcatctttgtttcaaagttaaactataaactaaattcttccaaagttagtttggcctacatccaggagtgaataaggtcagcttggaggttagaagaaagatgggatcagttaggtcagatatctttcactgtcatagttttctcagttataatttttataaaggcagtttcagatttttggtctccttgtctacattgctctcctctgtgtggctgccatgccccaaatctgcaggcttattgtttttattaactaatatcttaagtcagtgttaaagtagttaaataaagcatttaaacatcactgaaattatgaaataatacagaaagtaagatttaaagatatctgcgtacaattaattgcctaatccattaacatttaactattataaatcattcattgacatatcctggtttctatgaaactttaatagatttaaacttaatggaattttcttgattttcctgggacttgttagttgctctttttaatttagaagtttctgctttatagctgtcaatgcttaatgtctattttatgctttgagttaaaatatgtcattgatcattgttttttactgatcttgaggctttttttctgtacttctgaacaattctctgaatattcaggcttccttcctcttcttcaatttccagtcattaacaacagcaacaaataaacagcaagcaaaacaaaacaaaacaaagaaccccagatcacacatactatattttcactaatatgatcttccatgactgtttttttccaatgaaaacattttcgtctacctgatcacatttttttgccttagctgtttgccctttggagtctatatttgaacttatttctattttaaattgaaaagttgatatttgaattcatgtacaactcccatgaattcaaaattaggtagctctgtaccctcaggagcttagtgcaagaaagaaaacatggctgggctcagtggctcacacctgtaatcctagcactttgggaggctgaggcaagtggatcccttgagtccaggagtttcagagcagcctgtgcaacatggtgaaaccccatctgtattaaaagataaaaaaagaaaaaattagctgagcatggtgacatgcacctgtagtcccagctgctgtggtctcagttactcaggaggctgaggtgggaggatctcttgagtctggaaggctgaggctagtgagctgtgattgcaccactacactccagcctgtgtgacagagggagacctcaaaaaagaaaagaaaagataaaacacacacacaatatatacaaatgtaacatctcaacacctttaaatacatttatattttaaaagccagaacaataaatttatgataaaattcatgtgagcataatgaataatttacagattatttttaaggaacaagttgattatcatcaaatttaacttaaccgaggatcagggaataacagctccttcctaattgtgttaaggagaggattaaatgagataacgcatgcaaagtgtttagcaaaaggttcattttgattaagacttgtgtattcatctacctaatcaacatgtctacttgagaagtctaaaagacatcccaagtaagaatctcctaagactagtctaaatttgctcttcttttggtcttccctgtctgatattgtttggctatgtctctacccaaatctcatcttgaattgtagttcccataattcccaggtgttgtgggagggacccagtgggaggtaattgaatcatgggagtagttacccccatgctgttctcaagattttgagtgagttctcaagagatctgatgattttacaaggggacttccccctttactcggcacttctccttcttgccatcctgtgaagaaggtgcctttcttccccttcgccttccgccatgattgtaagttttctgaggcctttccagccatgcagaactgtgagtcaattaaacctctttcctttgtaaattacccagtctcaggtatttcttcatagcagcatgagaacagactaatacactgtctcaataaagggcaactttattatttccagtttcttaatctgaaagaacttggaggcatccttgagctttttctctctttcccttttccctcctactggctaaattcaaattatgcccagaatcccaccttttctttccacatccctcactaccattctgtccaaaccactagcatccctagcctgcataatttcaagagcttcttaaactgtctcagtacctttacatatgcttccctacaggctgttctaaacccaccaacgagagtgatctttccaaactatgtcacatcatatccctcctttgctgaaaacccccattcactcagagtaaaatgcaaagtttttacaatgcccacgaacctccttgaactggctctcttttacctttctggtttaatctgctacaatcccccttcttactcccccaactccagccatattttccttcttgctgtatgttggaaaaaccacacaagctctagccttagagattttgcactggctacctttacagggaatgctctttccccaataagccacatggcccatactacacctccttcactccttgctcaattgtcacctttcaataagtcccacctttgatcactccatttaaaattgcaattcccatctccccagctaacacctcataaccctgattccacttacattgctctatatttcttctatgacacctattacctgttaaaatgctaactagacaaagaactactacaaatgggaaagggaaaagacacccataatgaaaaatcagtcaagaaccagaatgaacaattacggaagagaaaagcaaatgaataatgaacatactgaaatatgatcaatatcactggtaattaggaaaatacaaattaaaacaatggaattctttggttggcaaatataccaataacacctaggactgacttcagttgtaggaaaataagaattcttacacatagctgatagaaatgaaaattattgcaaccaatttagaaaataaccaagaagcactattaaaagttttaatgtccatacccttggacccaacaatctaacgttggtaaatctattctatataaataaaatactagtatgtaagaatatatctagacaggtatttctattgtgcattgattgtagtgacatcaagaagaaaaagtaattagaaacaacttgctattccatcatagagaaatgattaagttgtgaaccctgaaaatctgagacaagtctcagttaatttagaaagtttattttgccaaggttgaggatgcacgccttaggaggtcctgatgacatgtgcccaaggtggtcagcgcaccgtttgattgtatacattttaggaagatatgagacaacaatcaatatatgtaagacaaacattggtttggtctgaaaaaggcaggacaacttgaagtgggtagggagcttccagaccataggtagataagaggcaaatggttgcactcttttgactttctgattagcctctccaaatgaggcaatcagatatgcatttatctccatgaacaaaggggtgactttgaatagattgggaagcaggtttgccctaagcagtttccagcttgactttgccctttagcttcgagattttgggccctaagatttatttttctttcacaaagtaaatttggtccattcataattttcaaatattatttggctatttaaaataattagagcaatatgtatgaactgaaggaatagtcagagattttttcataaatgcaaaataaccaaatagcagagttatatataatacaatatttgttttaatattaaatatttaatttaaaatatatatatattttaaaaagaaagaaaaatattttgtgtattagtatatatatatacacacatatattgtatatatactctacttatatttgtataaacacagagaaaaatatggaagaatgatgttaatactaattatcagagtagagtggaactgaaggaagcataagaatattgttaacttttttgtgttctctaatgtttgcttgttaaaatgggtgtatttctataatgtaaaatatccattaaaaaataaaacaggctactatttgaaaatacatggtccaataacctgataaataagtttatgtattatatcagatgacctaagttgttttgaatgttttattttaataggtttttggggaacaggtggtgtttggttatatgagtaattcttcaatggtgaattctgagattttggtgcactatcacccggaaagtgtacactacccaatgtatagtcttttatccctcacccctgtcccattctttcccctgagtccccaaagtccattgtatcattctcatgcatttgagttctcatagcttagctcccacttgtgagtgagaacatatgatgtttgtttttccattcttgagttacttcacttagaataatggtctctaattctatccaggctgctgcgaatgccattattttgtttctttttatggctgaatagtatttcatggtatctttctatctatctatctatctatctatctatctatctatctatctatatcacattttctttatccactcattgattgatgggcatttgggctggtttcatatttttgcagttgtgacttgtgctgctataaacatgcttctacaagtatctttttcatatgatgacttcctttcctctgggtagatatccattagtaggattcctggatcaaatggtagatctacttttaattctttaaggaatattcacactgttttccatagtggttgtagtagttttcattcccaacagcagtgtaaaagtgttcccttttcaccacatccatgccaacatctattatttcttgatttttttgattatggccattcttgcaggagtaaggtggtattacattttggttttgacttgcattttccttataattagtgaattgagcattgtttcatgtttgctggtcatttttatatcttcttttgggaattatctattcatgtcgttagcccactttttgatggggttatctgttttttcttgctgatttctttgagttccttgtagattctggatattagtcttgtgtttcatgtgtagattgtgaagattttctcccactctgggttgtctgtttactctgctgattatttcttttgctgtgcagaagctttttagtttaattaaatcccatctatcttgtttttgttgcatttggttttgggttcttggttatgaagtctttacctaagccaatgtctagaaaggttttgccaatgtctagaaaggtttttccaatgttatcttccagaatttttatggtttcaggtcttatatttaagtctttgctccatcttgagttgatttttgtataaggtgagagatgaggatccagtttcattcttctacatgtggctagccaattattccaacaccatttgttgaatagggagtcctttccccactttatgtttttgtttgcattgtcaaagatcagttggctctaaatatttggccttattgctgggttctctattctgttcccttggtctatgtgcctatttttataccagtaccatgctgctttgtcaggtcactatggccttatagtgtagtttgaaattgggtattgtgatgcctccagattcattctttttgtttagttttactttggctgtgtgggctctttttttggttccatatgaattttaggattgttttttctagttctgtgaaaaatgatggtagtattttgatttgaattgcactgaatttgtagattgcttttggcagtatggtcattttcacaatattgattctacccatccacgagcatgggctatgtttccatttgtttgtgagatgacctagatttttatctcaatgcttcaaaataatgtgacatttaaaataaattatatgatttcaatgttggagtttaggcagtttccttaatttacatatgaggaaaatgtgatcctcatgtactgatacatagcagattcttgatatataactgttgaataaatgaatatgtgtgtattaattaatatacaaatgaatgagctaagtaattgcccaaatcatagctagttggttaatctagaatacaactcttctgattccaggtccagggctcttcccatcatgacacaagcctgggagaacaacatgcagacatgtattgcatgaagctagataggcttagctagaaaactcttacaaacattctagctctaagtttgcctaaggcaaaaatcatgatactcatgctgtagaaccatatttatgtcttcttagaaaacctattgtcttttattttgggagttttgttttattttgagacatacaatataatgcttaaaaactaattttaaacacatgagatacaaaacaatgcctagtaacaagatgttccactctggaccctgctgctttgtaagaagccagccattgaccacacgccatcttgcatagaacgtccttgtggtttctgcagtaagccctcctgtggtccttccaagcactaaataaagcatcagtatggccactcagttgtcccctttcatggaacatttgattagcatgttttctggactttcctcatacctcaaaactttctttcctgccccctactcatccagactcatcagaagcatccatttacatagcttagagtccattcataaattaatcatggttattgcagccaccaaagttccccttgaccttcaactcctactctcttccccagcacacagttccacttttgctaatattcagagtatcttaccaaaaattgacctttactttcactctcaccaagcagatccaaaaagccagtttcactttgtgacacttccctccgggtttatttctacccatgataagtgattttccagtacagttttgtttgttctcttaacagagcctgaacagaggacttgaaatggccagctgagctggggttccagaaatctgctggataaaaaggaacaaaaagctctctgaggaaattaaaacaaaaataaacaacaacaaagaatctgttgaaaaaaaggtagccaaggtgcctgattactggcagtaactccaggatcattaaaccaatagctttggcattaagtgtttgcaacagttctctttgaactagattgttctatcataggaaaagacagcagtttgttggtggttactaaaagcaccacaggagcccactggtcagggtatgtgtgctcgggggtctctatgaatccagagactgccagggaccccacagctgccaactgtcaaagctctgcgtaaagatgaaaaacgttgctcagaagtgtggaaaaccccctgagcctgacaagttctaactaggtacagttttgagacattgtgtctaaataaagtctactgagggccctactataaagtttttgagaaatcttggactgtaaatattcctcttcttagtggattatgcaaaagggaatttgtaattttgtagcatctctgtcgaaactcttctgcagttgtctcggtgaacccattgttcagcattctcaggggtggttggtgttacctatttgggtgagaaccaaggcaagaggaagctcccttagcatgtctgtgcccatgtgggggcagtaaaggaacccagtgaacgtggtcacagtgttgcaacacacaaaagaaagaaatgccaaatgccatctcaatattgacaggtaagggctctgcctctgaccgtggtttttgaggggatgcagttcccaggacaatgctagcttgtgtagtgcctttgtgtaattgagaaaaaagcaccctttcttctgggcatatgcagccccacacgaggtgtcttggctgggcaagtagagaatgggctgtatcccagccttcgctcctaagccatgtgctgttacacagcaacctacacaaccgtcctcaggtacctaccctgacaagttacctactctgatgccacttgaaaagattaggcttccttggtttcctttcttatctgagggtaccaaaagaatgatgcctctattctgggcattgtgaatttgtgtttacatgatcagctttctcttctccaggccattcttctcaggctgttgaagcttggtgcacacactattcttaattccattgaagaatagaggaatgtgggagataaagatcaattcagtgataagcttaatctcagatctctcagcttgtcatgggttgaaatctttaatcaatggttcccaggtgtcacttcctcctcccattcatcgatccctgctcataaccagggcctttgaagaccttgtttttcctgcccatctacctctgccagaaaggagtatttctgggctagaaacatagtaatattgttttcttatagacctcatgtccgacttcttttaagtgcaaactgctgtctaagtaacaactagctttataggatatcttgaagcttagtgtgctgtagatattatcagtattttactaacagtttcccagctctagcatccatcccttcctggttccctgaagttgtatcgccaccatttccatgagtgtgtcccaggtttccctaaattttctggttttgttttttgttttgctttgttttttgttttgaattatctatccactctctctccttgctcagtgctttcagctggacctgccatgtcacatctgagttttctcaagtccctttgtttgtttggttggttttaggatttcactaaacttcctcttaattgtttacaactttgtgactctggccatcaaagaggatctatacccttttcaaagatgtcttttaaaggtttacatgttaaaggcagtctctttctcattatcctctctaattcttcatttttatttaaaaattttaaatacctcagagctatatgtatattttatgacagctcaggccatcattactttgaaagaacagcttgttctcataacgtattccatgattttgttaacactgtctttgaacttatattttccagacacataaaccaacttttaaaaattttgccttaaggcaacccatcttcttgatcagttgagttggccttcactagatctttcaagccatgtttattaaggaacttgagggtaaattcactataagtttgtttagaggcaaaataatgctatagtttttgtttttaacagaaaccttgaaatgtaagctccatgaaaacagggatttttttctgttttgttcattgacataatatgctcaccactaagaaatgcatctggcccataataggtgctcagttgttatttgccaaatgaatgataaaatctagtcattgagaaattttgcactgtagctctgtgagaatgatttcataagcaaacaatctaaatgccttgtaaacctctttgcaccagaaagtttatgctatatatatcaaatccatatgttttgggttattttcttctctaaatgcaattctttacaatgaaggtcatgtgctacttttcagcctattcctataaatttgtgcattttctctgtagcttattccttttgctttagcattttggtttgaaaagtcctaaaaatgtcattgcttactttctcttacaagtaatttctaaaaaaaaaaaaaacaagaatgaaacttctcctagccaaggtccttaagaaagaacaaatatttatactcacccagaaacacatctattatccgcatcctctagttcttttctaggatctatttttaaaaacatgatgaacattttcatagttactcaatatttaaaattgcctttgcctgtaatatcagtgaatctttcacatgtgtatttattcagtcaagcaagattcgtcattacagaaacttttctttccatagcgcaaaacacttgaatagtagtgaatctataccatgacattccattgctcactgataaggactttgactttcttatacggctctccttattaacaagaataataccaacaatcttcatttctctttcatggtggctaatgtattttgaggaggatttctaaatttgcccccaaattgcttcagaattcttgggtaattcccagttttttgtttatgtttagttttccagctaggtttggaatagatttacatgttaaagataatctctttctcattactctcttcgattcttcatttttatctaaaaaatttaaatacttcaaatgtgtattttagcttgaacttaggtgttcttttttttttttttttttgagacagagtctcgctctgtcacccaggctggagtgcagtggcctgatctcggcttactgcaatctctactccgccaccaagctcaagcgattcccctgcctcagcctcccaagtagctgggactacaggcacccgccaccacgcccagctaatttttgtatttttagcagagaaggtgtttcaccatgttggccaggctggtctcgaactcctgacgtcaggtgatccacccgcttcagcttcccaaaacgctgggattataggcatgagctgctgtgcccggcaggacttaggtgttcttaaagagagcattcatgtaagaacatccaaagtctttaacagtaaagctaaacaacaagtttcttaactcttagcagccatctgcttgtaatttatgagtacaacttttatattgcactgataaatagcccactgctttctagttgattttttcccatttttgatgtatttaacacattgtattttttaagttcattaagactttgagtcaagtctatttgtgtttgttcttgaatgctttaaactgaattcttattctacccatggttctttgagtaaaagaaggagaattttatttcttacatttttttaatgactgataaaacactaatcagaaaaaataaaatataaaacagtatgtatctctaatctcaattttaaaaatacgtatataaatcgaaagaaaatagaagcaaatctatcataattttattttaaattttctacgttgaaattgtattattataacaattattataaaaacctttatacagaagattaaagtacttgctttttctatttatttatttattcagcatttgttgagcctttgctaaatatttatagttatctttggtattaatgtatattactaagcaattgttaatttttttcatcttcaaagctgtatatactttatatctcaggtaatttgtaattccattaaaaaaaatgtgacaaattctttggttttccaaactgggaatttcacatttaattgttatgatttctattacatagtcaaccacacaaaattgcttcctataccaattccagaattttagctctttagagccaaatattatattcgtcgatttattttctaacttaaaaaaaacctatacttgttacaggaaaaaacttattaaaaagacctacctctaccattatcactagttgatctgtcttaattctttacctttagcaatttacaaacacaggtttaaaatggatttttatcacagtattagttttagacacaaaagctataaaaagaaagtattgtagaccttgtcaatttatttctgagtacagaaaatggatcatttattcctaagtaaatgcagtggttaagagctcaccgtgagcaaattacttaatctctgtgagtctcagttccctcaactctaagaacagggagacagtttccaccttaaaaaggccttctgaagacttaataaaatcaagcgtgtggtgtttaatgcagtgcctggctccatgaatcctgccatcactgtgactagtctgggcaggaggtctgtttgtttgtatgtatttctacaagcatcagcaacgtgagtgtaaatgtcatttatttagcagaatgctactgtttcccattcatcctgtcatcactcacaaaaccagttcacttcactccctgctggtccttgttcttactaccaaatgctatcagccctggtcagtttatttctgaaatgccagctatagtcaggcttgccattgctgccaagtaatctaacttacccagttttaggaatttgtcttctagcctttgtatagctgcattactacaaatactagatttgcttttatgtcaatcatataaagaggattatgaagaacaacaaataattttattccaaacaattttaatacaaataacttttaatttcctggtctccacattgtcatgacccttgttaattcccatctgaattcgattgtttgacatgttataataaacaaagagtacccaatgtttttgacatttcacctgtgaaaaaatggtccactctctataatcagaaataaataaacaaggtccataatacttgggttttataacttttctagccaaaggtaatgctgtgatataattccattttaatctatgtgatgctgtctgatgtcaaggctcataccactgttgtttaaagaataattttaaaaattcccttatatgcacatttcttccttctataatcccatctgaaattatgagcatatagacagttgattttgaaggtgtatgggggttactcaaagacgtttttaaaaaatatttattgacttaattaagaagttttttttttgttttgttttgtttgctttttcacccaggctgcactgcagtgaagtggcacaatcttggcttactgcaacctctgcttccggggttcaagcaattctcctgcctcagcctcctgagtagctgggattacagccacctgccaccatgccaggctaatttttgtaattttagtagagatagggttttgccatgttgaccaggctggtctcgaactcctgacctcaggtgatccgcccaccttggcttcccagagtgctagtattacaggcgtgagccactctaccctgctgagaagaagtctgtgtgtgtgtgtacttttttttttctattgttcatggatattagcactcactcatatttccaaaagcaagtttctataatctgaggattccaacagagcctatttgtttattatgagaagtccacagggaggtgaaatgccagccattaaatagagcaaagatgaagacactcaaggtttaggggttttgtttattttgtgttttttactatttgaactttaaatattatgatgggagtatttcatttcattttctagaatccttgggctagaatacgccatcgcagtaatatgatgcacacaaatgctcttcctccacatccttttagaaaaacaaaacaaaaactaaatcatcttagttgctttggtttgcactaatttcgtaaaccccaagaaagatttattggtctgcatcttagttcctgctacataatgaaatgctaatttcatttttataaaataatttctacattgagcaaaagataattttaagatcaaatcagatcttatcttttaggtttaatattttaattgcttttttgcacttataaaataattttaaacttatcaaaaaatttttaagacgtgcacaaaaatatttttttcctcagccatttggaaataagttaccactgaaagtttaaagtctgctttgtgagaaagaaaaaaattttaaaaaggtaccactggatgatttagtatgcgtatccttaaacaaggatataccacaagataaccatcaaaatcggaaaatgaacatcgatacactactacatctaatcctcaaactccattcaggttttgccaattatcccattaatatcctttgcataaaaaaggctccaatccaggatcttacattacatttagttttcataaattttattctcttacaatctgggtcagtttctcagtcttggcttaactttcatgacctgacactctggaatattataggcttgatattctgtagaatgtctctcaattttcttttggctaatgtttccttgtaattagattcaggttgtataatcttggcaagaatattacagatgtgaaactttttttaatgcatcttgtcatatgatcatagtttggatttttctcattacaggtgattttaaccttgatcatttgattaaagtggtacctgccaagattccccaatgtagcattattcttttacatttcccctagtattcattacatacttggtggtaggagtatgaaattatgtaaagatcccatttcttatcaaattttcagccaccagtcttagcatctattgatacttcttactgagattattactatgacggctgtcaaataatgattttctaatgggataatgttctctacacttatcagtaggcattctaatgtaaagaaaagccttttcttacccccacttatgtttattttaacatttgcatcagtataggttagtaattcctactttatttgatgaattctaatgtattcttattattacatattttgatattgaaagtatgccatattggatcaattttttgaatcctgcctaatttctggcacgaaaagaaattccaggctcatcaatttcacatccatatgaagatcacagaagaagagaatgaatatgaattattgcaattttttataaaaatgagcttacatatgacaacataatgtctcttctcatctctgatagcgtgtcccaatctttttgtatagctgataaagcagaagccactttttgtcagaccccttgcattagttttgttagagatgatacgaaacattctgaatcaaatcatgatctgttgttattatgtatagggtagttctacatatatataaaatgagaactgtttctgaaaagcttctacagagcatatacgaggaaagttattggatgtaagtctattatataaatgtccaacaatgattgcaacttaaaaaccagcttcattaaggaataaataattgtgctcacttcagcagcacatatactaaaattggaagaatacagaggcaattagcacggcctacatgaaaggatgcaatgcaaatttgtgaagcattacatatttttaaaaaaagttttaacataaatgagacaaaggaaatgagttataattattactcacatgtacactacaaattctctacacccataccccttctccggaactcaaaattcaaagtgaaaaccttggggaaaagagcaagcaatctcagaaactattttcgacctgaactgagtgcagagtgccctctagaggcatcattaaatcaatgcaatttttccaacggcagatgaactgttttaaagctcgatagaagcttttcaggagcagttctcgtcaaataggtagaattaccctacacataataacaactgatcatgatttgtttcagcatattttgtagcatctcaaacaaaactcatgcaaaggatctgacaaaaagtggcttgcgctttatcagctacacgaagggactgggaacgtgccatcagagatgagaagggacgttaacgctgtcctatgacattttgtaagctgttatgacgtcttccaaatatttcaagcagaaagaatgtcttcaataatttattccattatttcttaacattccttaacacccacagacagttcaggcgtcgattgagattggcaaactgcttcagcggtcagacttggctcggcatctcttttttgtatgcacacgaacttaaaagactctggtgaggtagaatcaagacttgtaatcatgtcttgaaaggaaattccaatatagatgtgaaaaaaattcacatttaaactgttgtttcaaataaatgttatttaatgattaaacaaaaaggtaatgcatttctattataaaatttttagacagctcttaaatatatggtatctaaataacttaatatgccagatatactcataaaaattatgtccttatcaccacctttgtcataatttccaaagatttgaataaaattatttttatcaatggctgtgtcttaaagaaaaaggtcctttcaaatatttgtcccaatgaaactcagccttaacaatattggtttgagttgagagaataattttaagatagtagtgttttgtcatatgataataatctttacttaaatacatagttaataaataacaatgagatactagggaaaattattagacatgactcaaaatttagtcttctcatattcctagagaatgtcacaacttggaactgtacctgtctaaaattcaggtagcgatttgagagaaacattttgataagttaaaggacaactatagttgacacaggatgtggttacatgaggtgaatgtatcagacataacttatatactctacttcattttgcaacatagacacaactgtaaaatacatcatttaaatgttcttgttgaaatgcctatttccaagaaaactaacaataaaatacataatttttctgtgcatgtgtagctaggttaactttgttctcttccaggtgtttatcaataaacccacctgagtgtatttccactgtagaacaatggtgcaaaagcattaacaggtgatacaaatgttagatcaagtgccaagtttttcttcacctaaatataggggctcagccttgttcataaagttgattaggagccaatgtttcctattctctaaatctttgattgtgcattccttatagtctctgcttcttcatgaaaatagaatttcaaataaataaaaataaccttaatgatagcatgccatactaaaataacaacaacaacaacaaaaacaaaaacaacaaaaacaaggaagctcccctctgttgacccaaaatgctattaagctatgttcttcctgtgtccctgtcagagggtaaattttgtgtaattttcaactttggaataaatggtagtgagagtaacagtgtttgaccctcttcttggttttgtcctttttctctactagggtcctggctccctgggtagaagatcccatcttagcataacttggtcttccaggcttaccttacccatgaaatctaatgtgacatcatttttctttgagcttttatgaagaaactctctgagagtttgttcggggagtattgagctcaacacttcggttaaggttctacccttattcatatttatttcgagtattggcctgactatggctttaattccagggaacttggaaaggacttctgaactccagtatacctccagatccctgctcactgacattgacattctatggcttatagcagacaggtgtgtcccctgttacgcaactcaactgttaagcctttgtcagccccttttcccagaataggatttactgaggctgagaaggaaagacataatatggataacttagatagagtgcatctgaagaagacaggggaccaacttgcacaggactttttaatgggagcttctcctcttccaattcagatctagttattcttgtcaatttactctcttgtcaaatacttaataagtatgtgaggctctgaaaaatacaatgatgaggctctgtgaggctctgaaaaatacaatgattagcaggctaaacctgtctctgccttcatgaagtttataattcaaaggatactaaatatgagtaaacacgccaggcaaaaaggccaagatatgcatgtatcagaatatcttctgttaaaacactgtgttttcaaaagctctatattctgttttaatctgtcactctgttttgtgaatgagattgtttcacccatgcagagcagtcccaagaagaaggccaaacctatgtcagcaggatgcctgtaggaggatgtggtttctacacaactctgttcactcctaacctctcactggggctagcaccagcacctgcagctgcactctatctctgctccaaactggctcctctgcctgcacggtcctcctgggcacagccacaagaggtttggatctagtttgtggcatcagtatagtgagctggcacatcacaaaagcagggaggaaataaacagggagctagccaagaatgcagattgagggcaacaacagagcccaggtttataagaaacattccccaccctattctctgggctttcatttcagacatgcaaatacaattcttcgatatctatttaaatttttaaattacatagccttgggtaaaactttagaaatgttccttcttgtccgaggaaaatgttactttcaaaattctctcagcaaaccctctctcttctactacaatcttaagccacaactgttaatatttccaattactcaagtaattaagacacctgaactcagtcatctaaaacacacatacacagagtaatttatgagtcacttgtttcttcacaaaatcaccaggagcatagttacagtaaatcataataacaaaaactaaaacctgaaaattgctgcttgattagcatcttttacacaacacttctcattctgggtcacccagattcctgatgtttgaacatctggaagcatttccattatagaagaatctactgtcaattcttccttttctcatatttgaagatgagctttgttctccagggtctttcctgaaaataatggtttatgacataagatcaaagcagaaaatgtgaccttggcaatggactgggaagaaatgtggcatttgaggtaggcgagtgtgtggaggaagaaagaacactaacatcctaaattcttattttggctttgctatcacttagccccactgagcctcatttctttgttatgttaatgcaggaggtcaattaaatgatttttcaagttatttctaagactgtggttatgtgtttttcctattgaatgtaattattttcctctagaatttacactacttgccaatactaatgaggcaaccgtaccatgtaaccataaaaaccaagtctggtggtttggggttgcatgctcaccaggcatcattagtgtcaacttgaaattcaatggtcttaaagtactgatatccaggggtgttaatgtataatttacaaaaagttaaaaacatgatggtcatgcaaacaaaatgaacccatgtccaaggttttattcaatgtattaattaatgaggtatcctgaaacatgagacagctcatttcaggagcatttgaggagctgggtattcataaacaatttaatggagaagtgttagaacaggatgattagatacaaaactgccattcaaggcagtaaaccataacattttggattatcttctctaccagataggattctacaagtttagaatcctatttatttaggttctaatcaactagtaaaatttaaataaactttagatgagctcattaaacaatgacattcaacaacatattggaccctttagataattttttggagacttctgtactggagacctttgaacaagtaacaaaaatatgagggctccaaacacctgaaaatcattgatctcttcctgtgtcctctctggctgctcacagagattacagggcagaccgttatttcccaatgttagtctgggaaaaacagttcacaataatatataacttaggggagagtttttttttttaagtttcattgtcaaattggtgaaacctactatcctattgataacatctaattcatattaatatcatttctatttaatttctatgttgatttattcttgtgagtgaagggcaggaaggaaggagatttctgtccatgtaagtttaaaataagctgtgaagaagccaagacccaacagatatttactgaatttcattaatttctgttactctcacctcaaactctttgcctaataatattgcctccataattccctgttcatttataatttagtcaagaggcccccttaaatcaagattttagtaatagtatttggttcaaagagtcatttctgaatttttataattcctggatggttaaaaaaaaggaaagaaagaaaacatagtaaaagtgtactcttagaccaaaaaaagtagtcacatgtgaaagtaactaaagttgtgtcagggcttttaagcttttgagaggtccagaacttgttagagaccctatcttcaggaagagacgataaacacatagcacacatattattctgtatttaatttgattgaatcccatccatggactttggtcaaaaatataaaagatagacctgatccctatatcttatctcccaagcctctctgaacatctgactttacaaatcagctacatttcagttggagggacctatagttgttttctttagaactagagcagaaatgcctgtcaaaatggaaaacctaaaacaaattctttggaaatagcatagccctccatggtccttctttattaacaatggctgaggtcactaagatcccagatgtagagtaaaaagtcacaagcttcagcatgaaatcttaccctgctcttcatgagtcaagtgacctgggagaaggtgtctagcctcactgcttagcctcactgacgctcaagcttactatctgaaaaatatgtatgagtaagaggtagggcccagagcagagatcattggagccataactctcaatcagttgagcagattcttggaacagatcccaaggtgggaacaactatgtacccacagaactaatgcaagggttatataggatctgttctattggtgtttaaaagtttggtagggtgttttttttgtttgtttgttttaccctcaggtcatagtattgtattaagagcacaacactgttggatgcaattattaagtgatctcaagaaaaaaggaggattttccaactttagttaattctgcctctcaattgtcagaatgttgagctttataggaaaaaatgaactttgataagcactttcttctgtgaaataaatctaggtcaaatcgaaatttatgaaacatattgatttcactaattcaaaagagaatgtaaaatattttcatgtacaaattcctatattaattaaagaataatctaaaaggtttcctaagaatgttataaagcccaagtaggtgacataattctcatttatttgaggtgtgactaaacttcttgagaatattttgaacccaatgaacattttttgtgcttttcttttctttatggtggtatactaaatttatggctcctactttccaaacttgtttgttagaatgtttggtaactattccacaccctcagaataataacaatagtatcgatcactgagcatctgtggcatgcctggcactgtgctaagcattgtacatatggcatcactaatcctactgtcagcctcacagcattacattgttttcctccatttacaaaacaggccaaaaaggttcatagaagctaaaggacttacactaggtcccactgttatgttcaactctaaaagcatgttgattttctactgcatcacaatgcttctttcagagggttcatatgcaagttctgaggcatattcattatagtgacagtgacaatgtcaatcatattggcaatgagaaaagacagtgagtgcaagtccttactgtgctacaatccctggagctccacccctcctgtgtgctttcagttcccagctggattcctgagtgctcaaaacgtatccctcccacagcggtcaacactgacgcccactctctccataggtgtgaccaaacccccccacgtctggtcaccaccatatggttctctttttctttgctgccacttctcctctttctgcagtggctgaagttagtgaagctgtagtcaccacgctcagtctcactgtgcgccaagcccagaaaaccactatcctcatgagggcccgtccctctttggttgtggtcctgagggacgtgtgctgaaccaggctcacgtgagaggacgcagggccccagctctgaggctgatccttcaccactctgtccaaatgaagagggaacagtaactgctggcttctaacatgcttgccactgaagttgaaacaattttaacagtgatgactgcatgtgattatttctgtgaaaagtcagtaccttgcaataatggatactcaattgttgtttaatatcaaagaacacatataatacaagtaaaaaagaacaaggcagccatgagggcaataccagctgagcttgagtgtccattctgaagctgctgctagtgtttccttgcttactgatttgtgtttccactttatcagtcctatgagtttgagtttatttacatacattttaggtaagcacttaatttattggttagatttgagttaataattaggtattttgagttaaatctcttcctggagtcatatttattcaataacaaatccttattgatgtcctactgtgtgctaagagactgagcagtgaataaacacagacaaaggcctttcctctttcctgggacatagatggggcaagggaggagaaaagtaaacaaataagaaatcaaaataataaaaaattcaaagaagaaaataaaacagaattaagggacaatagtgatggggctcagaaatctagttcagataggttagtcagcagaggctttcgccataaagtgacatttaagccagcactgaatgaagtgggatagcaagttttgcagaggaagagcaaacaccaaggcctggagtgggaactgcttggcatgttccataaagtttgacgatgcaaacgtgtctggaagaaaaagagcatgaaggaagagagtagaaggtgagattagaaagatagcaaggaaacgagatcatttgaggacttgtagatcgtgatgagttttatctccaaatgatcctgcctgggattgaagtggctcagtaacttttctgtcacagagggatgtaggaccagaaagtcttgtgacatcttggcaggcaagtctggttcagaataggtccgaaagctgcctcaagagcttaacatttagactagtccaattctgttgctacttgggaatctaattaacctgaaggatttaaggcagttactaaacaaattttgtgactttcctcctcacaggtttgtggaaaaaacctgaagataggtccaaactcattgttatgcatatgcaaccttttgcaccatgaaggatttgctgtaggcccagtagcccatattttacaatgggatcataaatgacacatgatgtacagatatttcacagcctgaaagaaacaatataaatatgaaagtcaaggtgcatatatagggatttttgattatagataacggaaaccaagcaaagctagctttaaaaataatgagagaattcattataatgacatggagtgtttcacagaatctgaaagttggaaggtagtcaggccttagaaggggctgattctaaaccagaaaattgtcaggactctctccatctctcagctccgcatttctctacccatatgattcattctcagctcactccagacacagaggagaatcccactggccaaactgggatcaattgtttactcttggtccaatcagttataaccaaaaggcaagttcaagtcatatcaatggaaacatggctgtcagagcctactcctgtgagctactctcaacaagggtggtggattgagcagacaaccctagcaacctctgccatacaggcatttgattaggccattcatctggttatttattttatttggagacaactttgagaagtactcctgcaagaactcctccctcaatccaagaggttattttcagggggtgagatatgatgagtcaggcaaaaaaatatacatatgtagagagagagaaagaaaaaaaaatcacacaattaatgcatttttccttgtgagttgtttttaatcagataatttctccattatgccaacatcatataaagcagtagtccccaacatttttggcaccaggcactggtttcatggaagacagtttttcgatggactggggcagggggtaggatggtttcaagcacattacattgattgtgcactgtattggtattattattatattgtaatatataatgaaataattacataactcaccataatgtagaatcaatgggagccctgagcttgtttttctgcaactagatggtcccatctgggggtgatgggaaacagtgacagatcatcaggcattagattctcataaggagcaggcagcctagatccctcacatgtgcagttcacaataatgttctcacaacctagacccctcacatgtgcagttcgcaataggatttgcgctcctatgagaatctaatgccactgctggtttgacaggaggtggagctcagggagtaatgtgagccatggggaggggctgtaaatacagataaagctttgctcacttgcctgcctctcgcttcctgctgtgtggccctaacaggccagactggcagtgggggttggggacccctggtataaaggaaaaataaaaatttgatttgagtaggaagctctggtttaattttggcattatcagctaatggccatgtgactatgagcaactccctctgggaagcagctggactagattctcctaagggggcttccagatactcttcagctgtaatatattatttccatgtggtggcaagtagctgcttagggatttgttttcaggttaattgaagacatacagcaaaaatggttgaggcagactgtagaattctacaggtctgagtttgatcttggccctgccgatgtttcagtttgacttcacttaagttagtaaattagttaacttcctaaactcaagtttacttacctgtctaatgcctgggacagtgactactttaataggttgctgtgcacattgaataagaaaatgcgtgaaagaacctggctcaccgtgagtgttcgattcaattcttgccattgttctcagactgaaaattcctaaacttgtccgtatcttcctttgtaagtgaaaattaaactctaatgctctttcaaagtgctctcatggcatggactaatgaaaacataatgagattagagtttgggagatcgtagagaagtatcatacataaataacacctccatgtcatccataaactcactctacgcctgaataatttttaattacctttgtataatgtaactttcccatgtctttctgggcagatgtgaaagcatggagctggacaaaaaaatccaggatctgattgagagaaatgcgtctcctcatccaaaacggttcaccccagaggccatgccaactcacagaaatctatgttctctgaaggtaagaaaacaccttttttctccttatctcgatgtacccttcagcagtttattcatcaagaagaatttgtggagacagtccccaagtcatttaccgtcagtcatgtacttccttgtcagctgagaggataaactgaagcagtataaaacttctctcacacagccacttcctgttactaaagaaattcttcagcagaagaatttgctggcactttccactttaaagtgtccaggcagctgtgactacaagaaggtgaggagatcatgctactagaaagaatgtttaatgcagggacaactctttcctgggaagaagtaacccatttaaattgggttaccaagatcagcacaactcatgtcgatgattttttgtagttgtttttgtttcgttttgtatttttgtaagaaaaagcaaggtttcattgattaaaggagttgtttgactttgaacttccactcgtttcagggtatttgtctatggtgctttatataagcaaataaaattcaagggtaggctcaagctaggaattttacagatgactttcttgacatgcatcctatgacaacatgaactcttaaactctgtaatcctcccaattaaaaactatctttcatgattcttactaaaaaaaaaaatctaatgtgagaatgtgagtagtttgagagcatggctggcattttaaaaagtaatttatacttctttataaaaataacattagttcttctttctaaagaagttcttactcagtgttgaaaatgtatatggataaacacagaaaactataaaaatcatgtagagacagattcattgtggagataatggagtgtggcctcccttaaacaaatatttacttttataactaatttgcatccataaatttgtttcttttttcttttaaaggaaatcccagaattgtataggcctcagacttcactaaacacagaactgcctctgaaaccaccagtaggctcaccacctatagagaccatctcttagcatttgggatacctctgtgttttacacacacacacacacacacacacacacacacctgtcttattaacttaccctcttcacttaatatgctgtggatactcctgtacctctttctttcattcatgtcatgaacagtgttgtgtgctttctgcatttagtcactttttcgtgtctaaaaactcacttcttcctgaacaggttgtctttatttttggagttacagatgaatgtgtactaatggttatgaggtcaaataaggcctctttcttctgttttcttctgctcttctcatcccaactcgaagccctcacatatacacctccaactcccaactagaaatttattccttcatggaaatatgtgctttttccagccaccttcttgtctaacctcagaaagaaatttcatggtgacaatatcaattccctctggtaccctcatcctcatatcctcccattatcatcttctaagacctatttgctcatgactgaccttctttgcaattctgttcattcgacttcttggtcctcctttacatggtaaaaacctcttctacatccttattaccttcctcttagctacaggttatgtctccttttgggacttcactgaaatttatgtctctctctctaagatactgattttcctacgacctcattgaggaaatttgctcattctcctgcacttcacacttccaggcaaagggcagcagattcttagctgatgttttctattttctttgtgaagtatgaggtaaagacatctacagagactgagagggtaagaggtgagacccaaggcttaagggaattggggaagatatgaaatgactattggaaggtagggagacagaatagataagtaaaacgaaaatgagttgcagagtagtagtgaggaccgagttgagtttgaaaaccaccactgtatgataagaccaatcacttaacagtgtgggggttcctgtatctctaatctctccatcacctctcaccagctcaaaatatgtaccattctcctccacttcaaacatatacgagaccccatcttcttttatgggtaatgtttgaactcactcttacacaacatagccaagctcattgatcacagcatccaaaactttccctctgctatcacaccattaataacctctatctggataaatccaatggtcattttgcattttacttttcacttgtctttttatttgcatttgacactatttagtcattcaattttcttaaaatatcttactcctctgacatctataattttttttttctgaggcggagtctcgctctgtcgcccaggctggagtgcagtggtgcgatctcggctcactgcaagctgcgcctcctgagttcatgccattctcctgcctcagcctcccgagtagctgggactacaggcgcccgccaccacatctggctaattttttgtatttttagtagagacggggtttcaccatgttagccaggatggtctcgatctcctgacctcttgatccacccgcctcggcctcccaaagtgttgggattacaggcgtgagccaccgcgcccagcccgacatctataatattaattcctggacaccctcaccacccctccccgctttttttctctggtctctccttctcactcaccttcactggcttcccttacatcacctgcttgtgctacattagtgttactcaaggatctgtcctgggctcattaaactacaaaatatatgacaatgactccagacacatgtacttactaaacatggagtgcttttctacatgtactttctttccactcagtctttcctgaagtgaattcaatatatttcctgctatatctgcttgtcatccctcccccaccctggccaccacacacacattttctatgctggtgaatgaatcactaggcacccaatcatccaaacttgggggaatcctggattccttcagggccaccatgctgcaccactcaggtggcaccattcacagaatagtgccatctttcgttcactctggacttttcctaagggaaggtctaatctgcctttattatatctttggacttttttccttttcttcattctatcaacatagatcttactaatgtactgaaaacctaaaagtggttaaaacttaaaagtagatctctttgcacacatcattgaaaccaaatgcctttgcatcatatatacattcctccaagatatagcttctgtcacatttagaacaaaacattagaagaaggatgtaatacttgttggggtaaatacctattggggtaaatattttattttgttttctacctacaacaacacttaaatatgactgtcttttatccacattttccagatgaggaattaaggctcatagaaattttaaaacattgcctaaattcacaaagttgtatcaggatagaaagccaagttcgtacatatttttcctgtagtgttttagtgtcttctatacattctgctatttcccaaagtgcaccctgtgttctagctacccataagcctttaacaaaccatgaagtttcctgtgctatcatttcacatgctgtttactctttctggaaatccttgcttctttgcccatttgatgaactgccttttttatcccaattcaaacctttctggttttgaaaccttttcaccctctctagtcccacatggcgttactcagccccctccctgctttgtcctacatctttatcttctttatatgtcatttatagactttatcattttgtttttatgatcacttatgtatctatgtgttttctctcatatggattatgagagactcatggatttcttgaggatggggtataaagtgttccatgaaggtataaaaatcacaacatagaattttctagaaagcaacagtagtaaacaacttgtttggtttcatgagacatggtaacactgaatatacatcgatttatccctataattcccctacaaatagttctcagagtctgcaggggagtatcaaatgtacactcttaagcttaatctctcagttcttgtatggaagctactatttggtcttacccatcctggtgtcatgaagttattgactgctgaaagttttcaggtgctcaaactgtccttgtttctcaaagtttgctgtaccactcttaggagcacctttgggtaccactcactgtgccaagtgtgctcaatgtggaatatgtcttcgagaactccaaatgcaaccaaacactattgctcttgcgactgaggtgaagagacttcttcttttccaactttagcttgcaattccagtgtttgccggagggtcagagtcctttcactttgtcgttgttcaggttttagctgctgtgtattgagcacctactcttggccagcatttttgcaaagtatttctattcattagctcatttcatctttacccctctacagatggggaaactggagttcaatgcagctaaacaattttctcatgattgtacagctaatgggatttagattctggacctaaactcaaatatgtctaatgaaaacaattgccctgtactttctacttttaattttccctccctcacctcagagttatttgaagactagagcagagctccagctggtgtcaggaacgatactgtcatcagactaactcctcctctttgagctaaaagcaccacacttggatcaagccactgttacttgattctctcccccgggtaaattctcctagaacagcccccaggagtctccattctttatcccaatagaccactggcatatcctcctcaattgtcctctgcaggtatttcaaatatttgattctttgagtaaacatggtttagtttccaggtggaatccctgctgagctactatttacacaatagcattctgcagaaagaaaccctatatttaaaacaaaacaaagaccttcacatttttgctgagatattgatagaaagggaaaaaatataagaaaatttctatttggttaacacaagcgtgagccaatgacagggagtgaaggcttctcttgttttcacactgaatgaagttagcctaagaacaataaggtagattccctttccaggagcaggaaattggtttctttatgactttatgggatgtgaagggtgtgactgaataaaacagatattatttagtgaaagagcctgagatatatgtcaagttccctttttgttcaactactattgccaagaatatgaaaagaagaattactataagagaaatgaacagactgactcactgctttgaggaaacagaaaaccactattgatgaacatgaggaactccatgagcatgaaagtgtgcttttatattctgggagagttgaagaagtagaaagttagtgaccaaaggtcatttaaaatcttgtaggcaaaggaaaaataattgcctaagtgagaatgatattaagattccaaaatgaatgttaaatgaaagttatatataaccaagttatagtccaagtactatgagaaaattatgaaaataatatatgaatctgcagtcatgtatcttcaaatataaaagaaagggacaggatgcttgaaatgtatttcttggataaacaaatatggttccaataatgcttgaaaacaaggatgaaacctgggagtgaaagggaaaatgcccaaattttaagcagacctgccagaattgaatttacctaaaatctccaacctgtctttggattccattgcttctgattttaacttagaggcagaactagaaatgggcttttaatgacttttgatacaagttaagggaggaactcccagtggctggggacaagttctagacctggacactcttcccaaggtaaaaagccttgagaaatttctttggttggttcagagattaatatatacttatgacacttcacaagattgtgagggaaaaacttcttgcaaactaccgtaaattgacacatgttttctgtaaccacactgtaggaaaaaaaaaaatctggctttccttttcttatttccctttttttgaaagctgttttttttttaatcaaaatcttgttttcttatctgtacaatgggttgtgataattatacaaagtgagagaaagtgcaccctgtaaatataaagtgctaaaccaacacaacactatcatcatcatcatcatcatcatcatcatcatcatcatcataatgctagtaggatgagcttgagcctcaaaattttctttaatggttttctcatacaataactgacttcctctttgaatctcattatctaatttcaaaggttgtagctgtggaatgttttgatctatttttttctgctagaaaaaaaaaagttgcattgttgtgtgaggatctgtttagctttcactgggaaacctttggacacctggctgaaaagctctgcctgcatgttctcaggcagtgaggagcctgtcagctcagccgctgcaccttatggcatttgacgctcattactggcaacatgggtgaagttatttaaatgagccatgcatctttcttttatctgtaaagcttggctattctgattctgaaagtattataagccctctaaattaaacagattagtggataaataggccaggttgtatttcccaaaatatcaccatagagttaatttgatcccatggttaatttatgacatatttctccttccattcattacgaggatttttaaaggattccactctacatgaatatcaggcatacatccagataaggagatctgactgcatatgcccagcttgaactctattttctaataaagtacaccaccagacaacccaggaaaacagagacataggtctgtgaactaaaattggatcctaacacaaaataattaaaactcataaaaattaaaggagagaaaatatttccctaacttttgaaagccacccacctattgggcagaaatttctacacaggacagaagtggtgcaaggggggaatataaactgaggctccattcttgttgataaataagacacacttttgagtaggatgctttctatttactcagaagtcatctgttctatcactgggagaatttgtcccatgttccacaaaagaaagagttacagaaaactgggagatgcagattgtcttttggaagatgtaagcagtaggtagaagaggattctctctgccttagtgaacacagcagtcctggctgctccaatttgggtcaatggggtgggcaagggagcagacgacaacactgggaggcttggtgggggaagcaaccaagacttgaagtgaaaagtggcatctgtgtggaaattataaatgttaattagaagaatataagtcttcctagaaccctacaaagagaagaaaaagaacttgaggtctcagggtttctactgaatggacacttaaagccaaaggtattatccttacttttggaattatcactccacctttgtcttcttccagacttgcatgacttcagcaagtaaatctgaagaagttttggataggtattccttttaatgtaagaagaagaacagcataagcctgtgggttaagaaatatgtaaactcatgacaatgttaaggaagcaaaatattgggcttgagaggtaccataaataacatgttcataagagttgtttagcaaatgtgttcattatattcttgatctatttaactttgtgacaggatgtggatgtctcctagggacatctcaacccaagctgggttttggaatctaatgcatcaataagccttctttctcaagtaagccttcttgtttctagtttgattgaaaatatttttgaatgggtatgggaacagtaccagcaaaatggacactgtaagctcttgctgaagaatgttcgtgtcattctcatgtccaccttctagatgaaatgtaataaaaacactttttactttattttgtacttgtggggagagtgaggcataactcacaaagtatgtaaatatgttttcttatgggactctagaataagtagcaaaaaaaagatcaattattccttttttttttccagtgaggaagatagctattctgatttctttttaaaataaacgtttgtcattaaaaccgacttagcaaatgtttgcaattttttaggctagcatattgggagatttttttgagtcaggcttattttcagacaaaacacttctggtatgtgttccttgtatcacccatgttttgagtcctcaccatagcctttccatatacctacatcatctttatatgcacatgttctttcttattttttttattttgtttattattattattattttagagacagggtctcgctctgtcactcaggctggagtatggtggtgcaatcatggctcactataacctcaacattttgggctcacacgattccccagtctcagcctcccaaagtggtcggattataggtgtcagccaccatgcctagtctcttaatttttataattataacttttggtatttaaaaatagtgtctaaatctatagatacggtgttgaaatatattgcctcaggaagaaggtagttctctttcacctgaagtatccaagctaatctggacaaccccttggcaggaatgatgcagaaaagattccatcatcaatggagtggtcccctctaatgttgagattttatattcagaaaacagaaaacacaactgagatgtgccttttgctcatcttcatattctagtacttagcacaatacttggtccacagacaataatcaataagtatttaatacaagaatgcatacattggtcaggtgcaatggctcacgcctgtaatcccagcactttgggaggccgaggcaggtggatcacttgtggtcaggagtttgagaccagcttggccaacatggtgaagctccacctctactaaaattacaaaaaaattagctgggcatggtgacacacacctgtaaccccagctgctcgggaagctgagacaggagaattgcttgaactcgggaggcagaggtttcagtgagccaagttctcaccattgcgctccagcctgggcaacagagccagattccatctcaaagaaaaaagtgcatacatgaatgaaggtgaagtcaacacatgagcaaagtacaagagaaaaacagagtgatctgcattgctataaaatgatcagcagctaatttccttccagagaaaataatttttaaaaaaaaactcaaacacagattacagttttaaaaggctgaatttctcttttctaaccactatagtttttgaaggctgaattttctctcttctgactactacagtttttaaagactgaatttctcttttctgaccactaatttctattttggaaatgcaaattaatctctaggcatgccatggtgggaatttgttaagattttgtttggatacaacgtcaaaggtcaagccacctcatatctatccctcaaaaacgcttaattcccataaaacttccctgaatcatattcctaatgacttaggctcctgcgatgcttttccatcattggtaaatgatgtctcctgctacaatttttaggtgtgttatttacgtctacccacacagataaaaggttctttgggggaagtaaaccaggaagactaaatgagctctgatatgggttcagccacccacttgtcacatcataattgtgagcaagtcatttgccatctctaaattcaactttgtcctcattagcattaaagctgcctcttcttacggggctgttatgaagttcagattgaagcaaataaagtattttaaaccacatagctccttagtacaaaatagtaattttctttgttttcttaactaaatttagttccattctaggacctctagcttgtcctttggaaaataatttatctaattgaccgcagaaaatttcagtcacttcagtgttttctcaggcaatttatattttctgtgcagtggtatgcaagaattatcccctgtccctacacataatggtacctagggatttgtggaacagattttgtgaaataatctgggtgaaatagagttgccagatgtagcatatagaaatataggatgtccacctaagtttaaatttcagataaacggcagaatattgtatgagacaaacatacaaaaaattgttgtctatctgaaattcaaatttgactggatattttgtatttttctggcaactttggggtggagacatcagggttacagtgatcccccatctgacactgccattggcactgatgtagtctatctcttacgggttttttcattggcctgtatcctcactggcaatcactaaagcttccaggtcactcagcacatctctagtccttagggtcatgtggtaaacactacatcctcctcaatttgactctgaggcctcctcaaaccctcagttaaccactctttcatccttcccaggaacataggaaatctctggctctgcttccacaccactctaaggttgagttgtctcaggacctctctacttagacaagtcataaggccatgcatgtcacagccgtgtaccatggtggtgtggagaaattctcttcaaggcttgtaccttccctggacttaacccagtgagtaaggctggagctgactctgctctttgatgttcaatgtaagcaatttggaagatgacagatgagtacctagaagtaggggaataggggccaggtgtggtggctcatgcctgtaatcccagaactttgggaggctgaggcaggtggatcatttgaggtcagaagttcaagacaagcctgaccaacatggtgaaaccccatctctactaaaaatacaaaaaaattagccaggcgtggtggttcatgcctgtagtcccaactacttgggaggctgaggcaggaggatcgcttgaacccaggaggcagaggttgcggtgagccaagatcgcatcactgcactccagcctgggtgacagtgtgagactccatctcaaaaacaaaacaaaacaaaacaaaaagtaggggagtagggctccatttcctcatgagaactgagaaacatccaggcagtactctttttgcctgaatcattttcattttcctgaggcatgaaacctttctcttctggggcagatggtgaaagtggtaaggacaggttacactgactcttcatctactaatttgttttattggttattcttggtataagtttttatgccttgattcagacttttcccctaacattttatcatgaacatttcaaacatgtaggaaagttgaaagaattgtatggtatacacatatacccaccatcaaaattctgccatgaacatgaacattttactctacttgttcaccatctattcatccatctatccacccctcttttaatccatcaactcatgtaactttttgaggcatttcaaaataaattgcacaaaataaattagcctaaaatctttaaaaattgttttgaaaacactagctcttgaaattcaaaggtttgattctccagatggtgtctagagtttggagagtctattttgaaatgcaaaggccaaacaggggctgttctcctctttttattctatgacaaacttaatctgacaaaagatatcccttactggcaaggcatggtggctcacgcctgtgatctcagcactttgggagaccgagatgggcagatcacctgaggtcaagagtttgagaccagcctagccaacatgatgaaaccccaactctactaaaagtacaaaaattagcagggcatggtggcaggtacctgtaatcccagctactcgggaggcgaaggcaggagaatttcttgaacccgggaggcagagattgcagtgagctgagatcatgctactgcactccagcttgagcgacagagcaagattccttctttaaaaaaaaaagatatctcttaccgagcaaagaaagaattagctacataaaacaaaagaatagtgtgtgttttgggggatcatcagttaatacttcaatatattaacttataagatcttagaaagcaccatgaaaatgtagaaagtattattaaagacaacagttctgcctttaaaaaattttcccatagcatatctaattatttatattatttatttattaaatattaatcaaaatcaagtaaaaaattttaagaggcatttgtatgaaggctaaagactattgaccatgtaaccaaaataggatgaagtaaaatatttgcctataaaatgaataaaaagaaaatacacggaaacaggccagctctttaaacgtgtgttcacagtcctacctgatcatttctggtttggaggcaaagcctataactttgtgtatccccgtggtcattgtgtgttctggactgtgttctgaaaagcaggggtgtgctatgattttgtactatagattcatacataaacggactcattcaataaaaatgtattgtaatactctgtaccttgaaggtactgtggtagttcctaaggctaaagtgataaatatcgacctcatcttcaagaagcttatagcatctcagaggagaaaggtacatcgaattaacaactgctttacaataagtgctagagttgatgcttcacaaagcaccatgagatcataaagaaggaagtagctaactccactctggaagaccaggggagacttcacagaggaactgatggtcaaggtgggtcagattgtttactgctttgtgggcactcagaaatctttaaacatggatttcacgaagtctgcagttttgtagaggctgcagactcgtcaacaaaagccaatttgccttctaatgtatctgatgtgccctaaaaactaaaagtatataatcaagacagactgcaaacaacctcgctatatcgcatagaagcattgtttcagagttccaaccaggcgggacacaagtgaatatcctctaagaggctatggaatctgtgacaccccattccccgattctcctagttcaaaaccaggtttgggggatcaaagagaggtgatttactagttggaagccaaaaagttgaagtttctgatctttagatcccatttaatctcttgagaagatgtatgatttgggagcatcatacatttgttttggggtaaggaaggcaatttgtatgtgtgagtcccacatgaacacgcacaggcactaaaatggcactactttgggctcgagaaacacagagtgaacacaacacacaaaagttgctatcatggagtttacaagctagtgtcgggaggcaatcaacaaaaagaagaaaaaaatttagtgttatggaaaaataaagcaggaaaggtgaatggaaagtgctggggtggagagcaattttaaattgggaggccaagtaaagactcaataaacagatgtcacttacaccattacctgacaaaggtgaggggatgtaccatgtggagatctagggaaaagacagttcgaggcaagagagaacaagttcaaggggcaacggtgtggccagggcatggcgcagaatggactaacggaaggataccaagaatgaggtcagagaggcctgggctagattgtgcaggaccttgccactataaagagttctgctttcactatgagtgacatgggaagccactgaaaggttctgagcagtggaatgacatgaaatgacattttaaaagtctcacagtggccactgtgttaataatggggaggggggagtggaagcaaaaatagaagcaggaaaacccttaggttattgcagtaatccagctaagagatgatggtgagttggtgtcatgcaaaaatgccaatcatcttgcccaaggtcacataactagcaagtggtggaactaggtttgacacacagtcagagatcagtcactgctggacacgctcttaaaaatgttcctatgaataaaatcaggaagcaaatattaaagtcctcattttgaaaaagttattaaaaggcattttttttgagaagctgtggtgggaggatcattcaaagccacgagttcaagaccagtgtgggcaatatagtgagaccacatctctacaaaaatttaaaagataaaaatagccagatgtggttgtacacacctgtagctactcaagaggctgaggcagctggattgcttgaccccaggagttggaggttacaatgagctatgattgtaccactgcactccagcctgtactacagaacataactctgtctcttaaaaaaaaaaaaaaagcaaagaaaagaaaaaagaaaaaggctgggcatgttggcttatgcctgtaatcccagcactttgggaggccgaggcgggtggatcacaaggtcagaagttcgagaacagcctggccaatatggtgaaaccctgtctctacaaaaaaaattagccaggcatggtggtgcatgcctgtaatccctgctacttgggaggctgaggcaggagaattgcttgaacccacgaggcggaggttgcagtgaggcgagattgtgccactgcactccagcctgggtgacagagcgagactctgtctcaaaaaaaaagaaaaaagaaagaaaaaatggtaagtttatttcaccttgccacttgcttattaaactgagaagtctctaggcttttgtggcaatgtgctcctcccctgtctggatatattttcaaaaagcctacaaaatgttcagatagattggatgcaggatgtaagagaaagaagagtcaaggatgactccaagatttttgatctggagaataaaaggtgttattaattgtaacagggaaggcaagttttgcagggaaaatcataaactaagctatcctgatcaaacaggtcaggtgaagaaggaggtaactattatgcatacaagcagagatgacaattaagcaattaatacaggagtctcgagtccagggatatggtccattcctagtgcccctggtgaactgagtgctaaatattctgattgtcacaagctgttaaaataaatattttgaatattacttttgctaatgtatattaactgcattgcagtttccaatctctcccatttaatacatgatgaactaaaaccaattaaaaaaccactttgatcatgtaattcctttgcccaaaggtctttagtaactccatatggcctataaggtcaacatttcttaatctgaaattaaaatcttttatgatttcatccaaataaactttgaaaataccacacggaccctactctaggtaaactggatttgtcagaatccttcataactaggcttgcccagttgtgttctgtttcttactgtgctccctttgcagcatttatagctcagctttcactctctgtcaaaatcctatctacccttcaaggcccagcagaaactctgactctttccatagctattaaaggtgataatgagcactctctcctctgaattcttacaggctttattgtctctatcattcatttcctggtcttcatttactgtttagtttttcaaatatatatatattgacatacacacagccacacacacatatgtatgtgtgtgtacatttcatcataagcagggaatttttgcttttgttttcctttggaacccacacaatgtcaagtacagggtgagtgatgcataaattgtggatttccctttccttttgtcatgttatttgtttcataaataatttgattgatggtcctatctttaaaaccaaattgttattactatataagctcagatagcaaccctaggagaaggatactattactatcccattgtataaaatggaaattgagccttagagaccttaagcatcttagatgaccaaaggcacaagcagtgagtggcagagccaagctgtgagtccagataatctaattctagagctagatcttttagtcattactaatcctctctttcctacctacatagcacatacacttaaaaattcatgcaaatagattcaggaaacaaagaaggtttttcagctcccattgtaaaagcataaaaaggaaaaaggcatgtttcttttacctgccaaagaatgcctccaataacttatagaaatatagtactctcctcttggactaattttaagataattattgtccaccagaatgatggttatagaccagtgactggtagtccttgttcctttaccacatttccctttgttaattttaattttctttcctctgtataatattttagtgacttcagaaatgaagactcttcacaacagccttggaaacatggaatgacacctctgtttctctgaaagtgatttcagctagtgatacttctcatgaaacaaagcttgactaaaagccagactcttaaaatatgtggcacaatgtgagagggatggaggtgaagtgaacagagcatatgtaacagaaaagacccaattaattcttagggatggcatattgaaagtctcatttttctgaaaccaaacttgtggctcttcagaagagttattacttattcataaataaccatatggctctcttgagctaatagaaaatctgtttgttgtttatctgcataacagaagaggcaaaggaattgtaaagaaagaagcaaaggtatagaatttccatttaatagaagccatcacacctaacaatgtatgtgcatcaggatattttacaggggagactcaagaggcacaatgccaaggatggtatttcctggcaagaaaatgttcttcccacccacttttctaggtcaatgttaccacatccctatacaaatacaaagttaaagctgaagagaaccttacactatataaaactatggagtgtgtatgtgcatggtatgtttcagaagaaaaatattcttacaatagagttttctttttcttttctgatgagcagattttagtgttgataaagtgtcagttcaggaaatcgctgcttctgtaccctaaagtcagatcttatgtgagttataactttttactttcagaaccctgaatgaacaatttgattcctacctgtatttttggattttgccttaaagcagcgtcactccctttcactcaagcgtagacccaaacataacaagaaaccagaagaaagtaaacacacacacacacacacacacacacacacacaaactagcaaaaagttcatcgattttgtaaatcattatatagatattcattcatttattcatgtagcaaaatgtgttgaatgcctgctgtgtgccagacagctcagtgcctgggtgcgtggacacagagattaacacaagaacatggaaatatgtaatcgtaatgcatgatgaagtgctctccttagctgattagaggaagtcaagagaagatcagaaggaaagagaggcattgacttaggttttccccgtcataaggttggatggagggcccagagaggagacatctgaggtggcaagaacagcatgcacagagctcaggggcgtagaaccatctcactcatttcaggaaagggaggtcagtcaggatggttggagcacaggggagagttggagagtagggggagatattcaggagaaatgggagggccaaatgtgggacactcaatcactctcttttgaattttaggagttttaggctttatcctatatatatgtgaatatctcgtaggcaggttaatgaagttaaatgattgaccataaattcttttctctttttagttacacattctttccttttttgtattccttgcctctttccttttgttccaagtccaaaatgaggtcttctgttccatcgcagttcacttatgcagctccaagtatctgccatttccacgcttttatctgtactacccagtagtgctccattacctcaaggctcctaaaatgataacagtcaaataattaaagtgaaaatgattctccatgagaagatttcacttcaaatgagtcatggagacaatctggacttgatttatagaaaagacagacttaaacttgagacaagtttaacctttctgccaatatagaagattagatttgcaaacaatgcccattttctttacaatgaattattttcccttttatttctataagaattagtggcacttatattattatgtattatgaattatgtatgactcattaagttctaccaagctacactcacatttagaaggtattgccagaaaatctcgcctttagggaaaccgagctgtcaaaaagtcaacagttacctaattgctctgggaaatacaatgaatttataacagttaggctactgaggaaacacttggattgcccaggctttctgtggtggagaacttcctcctccagtgggagaaactgccagtaaaggaagaatgacgatttacatactatagcaaggctaatctgccccaggtcttagtcacggcctgcctatttgagacatcctgggaaatccctatttggaagagaagaaaagttaaaatcccagttgcagtgcttataactttattctgtgtaattcctatccacagtcacttctgttcatttttaatgaaaacctattgctgttattttctattatgagttaacggtgatgtgtgttttttaaattttgtatacttgctctcaccctaaaatataccttaagagacttttcccctgtttttctttctgctttccaagactccaggaaaaacagcttccatggcacattttgtacagggcacatctagaatgattgccgcagaaagttctacggagcataaagaggtaagaacatatttctaggagatgagttgatcacatctagcattgatggcatttctagtggttaattgtgcacttattaataagaacagaaatggctagtttgctttctttagctaagatttgctctatatttttaaccaaaattatgtaacatagaaaaaaatatctaagtaaccagtacattgcttttaacccacggggcttaaattcctttcagccttccagttctgtgggttccttattttgttcttgatttttgttctataaaaatcttaaaagaatactatattggtgtaggtagaaatagaacatattgtaacaatagagtatctgtagtaatatttttatatatttacaattggtaccatagattttgttcagcaacagagactactgctaattgaatgaatgaattcaaatattttctagttttcttttacagataaccaaggtataatgggaaactaaatggaaacttctattcatttaagtttttaatttagtagcatcagaccttgaatatacattggtaaggatgttatcatagagaaagaagtgcccagatgctttgaacagaaattctactttatagggaataattataggaaattatgtatagggaataactgttccgtaagcagcccttgctagaatcaatgactgaaaatctttgtagttactgcaaatcagatgccttcattagcaactgtaaagcaaagtaaatacaaattgaaaaggtcccccaaacctttgtatttgattaatttcgctttattttatagaaacctgagacatatgaactataacaaaatgttgattaatctccagagaaagctttggtgatacatttgtgacttacatgccattcctagtcactatgttttctatttttcctccctcctatcctcccccacctataactgaatattacttatgaatttcaaaaactagtactcgtgcagttacaaatagagcctcttgcagatttggtatctagattttcagtaatttttatttattaaagaaaaatcaagggtgaaatgtattataattttcttccagagaaaattgtttatggggaaacaaacaaaaagcacactgtctcattgttccacatctgggctcccaaaggcagggacatacaaatgtttgccaatcacggatttttgtctacatcacaaacagagaggagacatttttgaggacccataatttattccctagaatgggaatatattgaactttagtatgaatcaaaattacctaggaaatgtattagaaatagaggtgccctggctgctcttctagaaattctgatccattgttcaggatgctctatgtttagcaagcttaacggtgactttgatgtgctcttgtggtgggaaccaccattctaaaatccagtcttactgtgcccctactttgctgatgacctcaagatacactaagtagggttggctcacagcattttccagatcaaagatgcttaatagttagtctgttctaacccagaatgggtccagtttcttggaagtcttccccaaaagaagaaggtccaattacgggccccaacatacttgacacttgggtttcagtgtcactcttggtgctcagccagaacaccttcttgaggtcaagagcaaatataatcattcagaatttattgacccacagaagactgtctctttttaaatgtggtcttaattgtaacataggtctaaataggaagaagctaaggaaacgagaacatctctgcttacttaaaataccatcaaaccctaaaatgctgaaacataaacaaacagagaaaagatagaaaatacagttttataaataatttctgatgaaaaaaggtgcttgaaatcccatgatgattgcaaagaacaatttcctgtacacatttctggcaaagaccaacaacatgttttgaaaatatttcttaatggttcacaaatagctttaagcaacttagtgatccacagtaactattaagcctgaaacagattacagatgtaggaattactctcatcatccaataaattgtattacttatatgactctgagatgagatagtaataagactattgaattattatagaggatccagtcctttatttaagtaaatattgttcttagtcgatttaggcagatggcagacagcttccacagcttttgtgttatctttaaatgaatactctcactcctgaaaaaaataactgaaaagaaaggtggtaaattttcattatgccagtaatttattattaatctaaactagtaacctagtgactttattcaaagagctggctaaaattacacagtaattacacagtaatggctgtatgtgtttgtctttttctcgatgattttgtcgttcctctgacgtttactgggtctacttttcagaatattactcacatacatgttcatgggcacagctaccaaaatgacttttatgaaatgtttactataaaaatacctaaaatatatccatgaaacttacctgatttctgaattgtcatttttttggaaaaggattgaaatccaaattcataaaattttaatctctgacttacccgttatagtatacagatatatttataatttattaaagaattatattggtaactaatttatgtaaagcattctaaaacataatatgaagctgactcatccaccagccatgatgaaggacttagggtatgaggattattactgctagaatcaggtattttttaaatcgcaacaggagagttggccaaatgcatggggtttctgaggaacagtacttctgtttattttgtaaacagctttgtttcaatcttctctctttttttttttctaagtgtgctgaaccatcaacaagaaagaacttgatgaattctcttgaacaaaagataaggtgtttggaaaaacaaagaaaagaggtaacttagaaatattcgctaaagccacaggtgccatggattaatgctgaggataaaataatgtattatccttgtgccttttatttttgttatcaggtcacagtatttatctttaagatactggactgcactattttgaaagcaaacgccttctttcttattcacctgtatgtttcatacttgttgtctcagtgtctgtgcagtgacgaatgaaaaacgacaaagtcataagtctggtaatataatcctaattttctcaaaacttagatgtttcctccacacagaccaagttactttatcctttatgcctttatcgtttgtgccttatgacctttaccctttatgccttgcaacttgacacaccttgaaactcaaggtttcttgagttacttgaaaagtctttaagtatagttgatttaggtgctatgacttcatgaactgggcatccaaacacatgggagttaaaaagcattatcataaataaagtttgtttctaaaatgttcctgggaattaatgggtattatttggaattttatttttctgagcttaatgaatgttagaacctctttactcttcttgacagaggaagtagtgaaaagtataacaattttagcactctgtatattgtcaattttgtaattccttcttttttttttttgagacagtgttgctctgtcacccaggctggagtgcagtggcacgatctcagctcactgcagcctctgcctccagggttcaagtgattcttgtgcctcagcctcccaagtagctgggattacaggcgtgcacgaccatgcccagctaatatttgtatctttagtagagatggggtttcgccattttggccagcctggtctagaactcctatcctcaagtgatctgcccacctcagcctcccaaagtgctggaattacaggagttagccaccgtgcccagcctgtaattccttttctaattcattctgtgtactacatctttcatgttctcttgcatggtgccttctactcttctttgatacttgaagaatattgtgaccttctggaaaattattgaacgatggcagagtaatgttactatagtatacacatgggaatccctaaaatgccaacagagtaactctcaatataataatattatacagtttcatactaaataatgatatgtattttcagcataagagttacctagtaactgccactctggattcagtagtttgctttttaattaggagaaagttttgctactttttagtcattatgactgtcttctcagtgtctgttccctatagataagcgttggaatttctcttaatgcagaaaactacaaacttccccaacaaaaagccaaccacatatcatagcacttcttctgccttctaattagcagatagtcttaagatctttaaattatttgtagcctaaaatgcatctaaatattgtcctatgacgaaactataatttcttgaaaatctaaattttcaaaatggtgatattacctatttgttgagtatttattataaatcatgtgttaatcttttaaaacacattattgcaagaaaatcgtgatcagttaatggagcctaggctttgttagcataaattctgctttaaaagagctggaaaaaatatttcattataatcagtgtaagcacaaagaaaaatacgaaaaagtttgggaaaagaacctccatgcattaagaaatcttacagacaatcatcaatacttacaaatttttatcagattgtggttggattaaacaaagaaaatgaaaatccaaataactaaaaaaagttaaaagttactgataaactgttcagctgacttgtcaagatatacctgagacttactggtttttcttttcttttcttttcttttttttcttttctttccatgagatggagtctcactctgtcgcccaggatggagtgcagtggcacaatctcggctcactgcaacctccacctcctgggttcaagtgattctcctgcctcagcctccccagtagctgggactgcaggtgcatgccaccacgtccggctaagttttgtatttttagtagagacgggatgtcaccatgttgggcaggctggtcaccaactcttgacctcaagtgatcccacctgccatggcctcccagagtggtgggattacaggcgtgagccaccggacccagccagtagtttttcatatacgaaccagttataaacagtgagagtgtgttcaatttaatcatcccagcacaatcagaacttgatggaaaaaaatattgtcttcatccatggcttctaaaaccttaataagctcagaaagtaatttctttttgaccaaacttccaaatgggcagaaattctttgttgattcaccaaattttaatgatttcagctcctggaagttaaccagcaatgggatcagcaatttagaagtatgaaagagttatatgaaagaaaggtaaatacctctctctattcggtattttctttaaagccattatcctggtggggccaattgtgtgaagagtctcattcatttcagctacaaagagctttgtggatagccaactgttggaaaatgacgggaagggtgctaagtgtagtattggtctcatggcactgaaaattaatgaacggtgtcagtgagttgtcttgagcaatagctaaagaaaggtgcaaaaatggcccccagtgatgtctcaagagttcttgtgcacatttatcgtggctcacagagtatcccagccttacctttgtcactagaagccacaaatacacaaagttatatgtgaggtgagatatggtttaaagtccatactgtttacgccaggttagccctaattctttaattagatagcatgacctattttccacaaatagagaaacaaatggtggtaacagtgaaaatgtgagtaaaaatggagcaacctcctcttccatctaaagcatatttgctctcaagaagctctggtgagaaaggggcttttggaagaaaacctcctttaatacataaaagacaatttataatttaaaattattctattttcaaaaagagataaaaagagcaagtactttcccctaaataattcagtattaagaaacttgaccatgagtattgtaatatagcagcatttttcctttcttcctcattttgttacccagaagtattgaatttagaaggtgcaggataatgttcctgctgcaccaggcaatggtcaggcagccttgcaatatccctgctggggcaatccggatctgtaaatgttaaagatgatgatcccagagagaatgcttaagctgctttctcgaacggcttgcaggtgtgtgaagacagtgttagtgatggctataatctccatcttggaagatgcatccatctctaagattctccctctggactgtggccactctgaggacctgtcactctgtcatcagagtgatttggcacctagtaggaggtcaagtgctgcaaattactgataaattaaaggccatgtctgtttttctctggtgtaggcatatgctacttaacctgctgcccctcattgccctttccagaccaggctaggctcacctggagagttgagaatagaatgacaaacctacagattcccctgggtggggtctaagtcttttatcccctctgaagtaggggtggtttggagaaaagaaggaagagctgggtggtttggagaaaagaaggctgttttggtgcaaggccaagctccctttgaaacgcgagtatcccgatctgtgttcgggacggtgggagctagaacctctccttaggggacgtcctggggtggggcgtttctgccaaagttcatagcctgggaataaatccaggggcttgtgagcttcagagaaggtatctgcagctgtctttgaacgacctcctcaggtagcagagctgaagacgaaactggacgccgcggaaagattcctcagcacgcgggagaaggatccgcatcagaggcagagaaaggacgacaggcagagagaggacgacaggcagcgcgacctgacccgggaccggctgcagcgggaggaggtgggcggggcccgggtcctcgagcccggaggatccaaataaaagcaaaggggcggggggatttcctgtagaaaacctaccgttttattaaaatcaactcactactgagcaacgaccgatgtgcaagggtgcatgggttacgcaagtccccaagagccatgaacaagggtcacttctctagaataagaaggaaggagattctctgccggcttcctcctggtttgcataaataggcagacagtcattccccagtcccttccaggaagaagaaaacggatccataaatttgctaactctctagggcatttcagcctaggagaaatttttttttcttttgcttttattcgtatttattatttttattagtagtgttcataataataatatggcaataccttgtatttgtgcagtagcttttcaagcttacagagagatttatatatgaggtcttacttctgtcaccataaatttatgacattttttaaagccttcgtcctcattatctcatttaacattcttggcccacctgtgagcaaaatattatttttgctatattaaaaatgagaaagctgagatgtaaacaaattgaattgcccacgttgatgaaaaaggacttgaacccaacctccagattctaaagctctatcagtcccttgctgagaactggatggtgacaattgagatgacagcttttcctgaagaacactttttcttcctggttttactttcaattattggacttcatgaatattgtagaaaatgggaggaaaccttaaactctaatggcccctcgttattttaggtatagtaagaaaaaacaaagtgtaaagactctgaggggaaatcttatcactgatatcgtgaggcaatggcaatattttaaaacatgtacaaatcttaaggcaatgtctgaaattcgcgcagacaatgccagtccaggttttcctatcttgctgaggatgtctttgtcacagtgagtcaggaaaacagagtttagcaacactccctttctgccatgtagcagtcatttccttttccaattacactctagccaggaatctgagtaatttttccctcaatgcagttgggaccattatcttattggaataattttctcttaaattatgctaaattagaaaataattggcttattttctaagtgtatatgttcattctatttaaataaaagcaaatagaaatattttcccttttaaagaaaatgaattacctaaagcggatttcttaaatttaataatcatattgggaaatattagttactcaaataacacactttaacacatatattagctatttttgcatgtcaagttacctattttctgcaatatttattttactgggttaaaatctcaatctcattaagaatccaatttacttcacaaaatgtttgctatctattatacaaaattaagaggtaggagatattgtctgaatccagagcctgttgatgtttacgcagctaaccttcagttgtttaaaacactgcacttctggatgacaattttagattgtcatctaaaattggaggagtggtggcagttggactagttgatttctaccttttaaaaataataatcacaacaatagagtgctctaaataatgatctgtaatgaaaggtcttattggcctaaggattattctcttttccctctttctaatacagaatgatgcaggaatgagctttgagatatttagtattgttttctcacaatgagagttttttctttttaagactttcagctatttttcttaatcacttatccatcacctagtgacagtatataaggacttgcttatcctgcagacccatttgtctgataattgaaagtaagaattgggaatccagcactttgggaggctgagacgggcagatcacgaggtcaggagtttgagaccagcctggccaacatagtgaaaccccatctctactaaaaaatataaaaaattagccgggcgtggtggcaggcacctataatcccagctactagggaggctgaggcaggagaattgcttgaacctgggaggcggaggttgcagtgagctgagatcacaccattgcactccaggccgggagacagtgtgagaattcgtctttaaaaaaaaaaaaaagaattgggaattttgattttttttttcctggggtcacaaaatttctaagatacttcagtaaattctgataaaagaaagattccttcaatcctaattctagtgtgcatccaaagaatattgctcaaatggaacattaagtttaaagtcttgcaggtcctgtttttattgtatttcagaagggtgacccctcaatctgcctgccatggctgatatatcagaattcctacaatatcatctcatttgacttgtactgacttttattttcttttcttggtcttaacttcagaaggaaaaggaacgcctaaatgaagaattacatgaattgaaagaagagaataaacttttaaagggaaaaaatactcttgcgaacaaggaaaaggaacattacgaatgtgaaataaaacgcctcaataaggtatcagtcaggtcaagcatgggagattaaaatgagaagtccctgcataaaacattcttactgacagtcgcaacaaaatctaggctgcagtgtgggtcccagccttggaggcttgcacaagaaattatctgtgattttataaatcactcctagctgcagctttcagtcatacttggctaaggaggctttagagaatttttgtccctacaaagattcatcatgagaaagagaaatgaggaggaattacagagacagtaagaacatttcttagtttgaagaaccacataaagcaagtgggtgtttgcgaacaataacgtatctcttggtcaaccgcaaaagcttcctcaggaaacaaactgctctttaaaatgatcactatggagttgggtgtgaaacacactctaaggaagcatgctaaatgcagaatccaaggctgagatgatagctctctcaagtgcaagcctaaaacctactttaaacctactttaaagtcagagagaggaaaagtgtgcgtgtgtgcatgcaggggtgtgtgtgtgtgtgtgtgtgttgttttatggactagttcattcatgttttggaggaatgggtcgctaactagttcaggaaaaataatcctatactgttgacttttccaagagccaacccatatgtggaacataggaatgcgctagcacatggttgagttgagatatgcctctctcaactagatatttcatgataaaagcaacagaaattgtcttctgaaacaagagtaggtgattggacttgaaacaggtgctcaaaccctgtattttggaccacatgcccatgattgtagttaactggtgttcagagatgttatttaaagatcctcaaagtattaagtatgtgcctgcatagttgataggatgctttgcaaatgtgatcctgtagtagatctgtgtgtgggacaagttattcttcaggagaaaatgggaaaatgaggataaacttcataaacaatatactttatcctctaagacagaaaaaccatgctcagacatacaaatgcggggcaaaatctatcttttccctttttttcttttccagaaaatgttgcacaaatgcattaaaggaactataaataattgagattatatttaaaatcctcccatttttgataccgtattacaagttttcttacattgtctagttaatttccctaaatgtagacacaaagatataaaccttgtagatattagaacagccaagaatgctgtagttttgctcatgtccatgtgcactcttcatgtttgtgtatccatatttgtagttcacagaaaattgtttcaagttagaaaaatacaatttttcatcattccggtgattatataatttaataattctacacgaaattttacattttaaaattttatgattttacaattataaaatctcaatgagaaaaaataatttgagtaaaatcagatctttatacaaatgtcacctctcaaagatgacttttctggctgtcctaattaaaattacatactatactactggtatttcccggtttaatttttccttggaatttattactatctaatgtatatataatgtctaacttttatgactttatttgttttctagctactaatcttggttgttagttccatgaaggtaggatttttgtgccaactcctccattaggcaccagaggcacagtggccaggcctacagtactgttagggacccataagtatgtttatgtttaatttctcttaaaattagaagaaaaaataaactttggggttgaaaacacattttcatatattatgtatccatctttataacaacacatttgtaaaatatcattttaacatgtatttttagggagggagggactcaggcaatgtcataatgtggttctgaattttttctgttttgttcactgctttatcttgaatacttagaacaggactttgctcagagtaagttcttaaatatttattgaatgggtgaatggatgaatttaattagctagtatataatatgtttggtagacaattctggacccagaattcatgctttaacaggcataatgcattacttatgggtagtgagcaaaaaataaaaggatgcttaaagccagaaaagacttcatcccacatctatactttaagctgtcccttaaaagtatagatataaagtgatgagttatgacagtagatttttgtcttatttaagatgggttttggtacctaatgtaagatattattgttcttctattttacaatgaatatttttcttttccttcttaccaatgtgataaacaaaagttactcaaaatgttgattttggtagctgattttgcacaccatccatcacagcatggaatccagggcctaccctctatgtacaagctgaatgcttgctgacccattcactcagaaaaaatttgtaatatgtcagccttgtaattaacatactgtttttagaagttcacacaattatgtgtactctattcaatttatttgcattgaagaaaatggggaaatatacctaggagtttgtttttatcaggctcctgaagccagatgtttaaccaaagtgaaaacaattacctaaggctactcagctcgtgccacccgtgggcaaaattgatttgtctaacatctcagtagatctgtttaggatatccatactaatcgtaaatattctagaataggttataggtgtttgttcaaggaagttgggaaagcccaaaatggaataaatatctattagactcatctttcatttatgactcatttacaaaatttctaggatcccaaatagcatgaaaagtagatcagaaaattcaaataacaagatctacaaaagtagtctattcccaggtgtaggataaggaaccagcatattccattgccataatccatttggcccaccccaccctagattctctttactactattcaccaattgaaaaaaaaaaattgaactattctgacacttcctagagcttaacacaaatcctcaaaaaacataaattattaaactacttttgttgcttctttaaattctccctgaaggatgaaaaaagctctttttttctcttacaacttcctgaaaaaaaatgatattcatatcaggctagacagtatttgtgtattctaagacattctattaggaaattcccagcctattcacatactcaaaaccacacatttgcttttcttttcctacctttatgaccatattatatagtaatgcagtggagtaagttaccactaatatcaccaaatagacactgttgaagttactaaagaaatacagaagcaaattattcttagatctctgaaaatgaaccttttctatttgtacagaggactcatttgataatgagcaagtagtcattttatggtctctgaggccacaccaggatgagaagtgttctgtcacaatatttggaagtaatttttattgaacttatcatgaaccaaaggtcttcaaaatagaggcaatgtctttcatatgatattaccaaacataatgtaatgatatgcccatcatgagctaatgactaaagatgataatcgttctggtgaatacaggtattacttctttctttcctctcctcatgtcatgctaaaagcatcaacttatactggatgtcaagaaagcagggcactctctccactcggtagtgagttaatgaatgttttaacagaaaataaacaggactgtggctaggccagggcagaagagcaacgcaacagagctaacagataatgaatctgcatgggctttcatttctgtggatgtccctctctcttgttggaggcatgccatagttatatagtagaatgttactcaaaacatcacctgggaccagcagcaccagcttctgagaaatgcaaattctcaaaccataccctccagcctactgattcatcatctctgggagtcagtaccaagggatgggcatatttgctgcctctgattttccctaaggctaagcatcattgaaagggtatacatttgactgaagcagagaatctggagaaagtctatagatacagattttgttttcatagttggctaggtggaggaggagggtccaatatcaaagcctaaataataatgaggattgactaacataagcatcatcatggaaaaaagacagagattctgaaaaaaaaaatacatatatgagaaaatcagaaagaagaaagttacttggttatgtaagcagcgttaaacatgaaatgcatatttgtgggtgcatttgagatgattgtaacaattataaaagaattcattccatgtggtaaatcttagatcaacagtgtacttatcttattacgtaggctcttcaggatgccttgaatatcaagtgttcattttccgaggactgtttgaggaagtctcgagtggaattctgccatgaggagatgagaacagaaatggaagttctgaagcagcaggtgagaagctggaagtggcatgatcctgtggagaacatactgcccatttttcatgcttctttgggcatttttagatgtcttgctgctagaaatatgtcaaaggtttttgcatttattttaagtagaattatctaattttcaagcttgatagaaagaatacagatcagctagttcagtcccaccatttagaacatagggaactgagtttcagacagattaaatgcttacccaagatcacacaattaaaagaggggcacgccaattaacctttgggtgaggttctattagcactggggctagggagtttcacgtagacatggtttttgtttttgtttttgagacagagtctcccattgtcactgaggctgtggtgcagtggtacaacctccgctcaccgcaacttccgcctcccaagttcaagtgattctcctgcctcagcctcccgagtagctgggattacaggcatgcaccacaatgcccagctaattttttgtatttttagtagagatggggtttcaccatgttgtccaggctggtctcaaacttctgacctcgtgatccacctgcctcggccttccaaagtgttgggattacaggcgtgagccacagcacccagccacgtggtttattttaagaacactattaatcccaactctggactttttcagaaaatggtagcagctgagtggtgattctgtagttgctagcctctaggccttcgcacaataagagcagtttcaaagaaaatactttgtacttattataatcactgaaaccaggtttctcagctagtcccgtgtatggatggcaccacttagcaattcactgatgcacaagagcattctcctccccactcacctaacctcacgcgctattgccaagtggacagcaagagtaaggatgcactctctacaacttccgcatgtatctattggcagcatagggctgtggagatactgcattggttaaactacctgtgtctaaatttaatcaatctgctgaaattcacttagctgaggggccgaccatgcatatcatgtctctttttatgtgagaggttaaattaatgtagagaaaaatctggaatggttcatggcaataatgataaatacaggatacataaaggaacctcaatccctgaggcacacattgtcagtaacatattagcaatgggagacagggtgtcatagaacaaagggctggaaagcattatttttctgatgtccctgggtatgatttactgactggttttgccctgagcaagtactaagtacaaagatttttgttgcaatacatggaaaaattcagcaattgtgttatgattgttgctatttactttattgttattgcttcatatgaagtagcctgtgaatagatctaaaaattttatagcatttgatggtgaagttggattttctgttctgtcaattttacttgaataatctgcttcattacattcagggtaaaatacatagctgaaaaataaaccgacgaagagaataagggtaatatgcacagtcttaaagctctgtcaaactctcaacccctaaagtaactgttggtgctagccaggatttcttcaaaaaccaaaagcactgcttatgttcaaaacacttgacatcttcggaactcgcatataaggtacaccacatgcaagagtcacttttacacataaagtttataataatgatttggttcatatttgttacagtgacagatactcttttttcataaaccctgtgggaagaccaaaatccatctccgtagttttgcagtgcctctactgctgactttctccataaatattttaactgtgcacgtttctaatcaggcacccgcaatcattacatcaccaagtgccgcatgaaacactaaagggtttaaatgcacaaagaaactgagttggaatcttggcccctacctgactaaagtgatgatgttgccagtgtttaattctaatcagatgggctcctcccatttaaaatgcctctggtaattgtttacagagcatcagtttaactgtctctggaaatgaatgtcagttctcaaccaaaaaaatcatcaaaatgtcaatgtggctggatgtagtttcccttcagtgcttctggtgaataaagccttaaaaatgtaatatgtgtatctgcatgtagatctatacaaaatttttaatttcttcccttgcatattttgttctattgctgtcgacttagaacaataaaattgataaacctttagttaaaatttgttgggctgttagtgatgaaagtgtaatgtgcattagttttaatagataaaaatctagctataggttccaatataagtagtaatttaaatcagaatcttagaggaatgtttttacttcattccttacctttcatttgttttcatagctttatataccagtctgctaaccttcagtcaacagtaagtcagttgaaaacagtaacaataattaaacctgtttttgtttttagtttagtcacttttctcaaatatttggagtgcctctcaagaggtgttccactcaaatattactattatttatgagatacatccaaaataacttataaaaggaaaatttgtgaataccttttaacaatcatgctttgcttttccacatatgtaagggtttcatttcttttttgcattcaacttataatttatgtctggaaacttgggcatgtcagtatttagtggcatcacttaacatctattgtcagtaaactgtcttttagaagttcaagcagtattcatacatcaaagcccttgtgttagggatggatgacttgctccaaaacagtgacactgaacactagttgggagggttctttacaataatggagtaggcagcagtcatttaaaataaagtcatttaaatggcttaagtgaaaaggaagcttacagtaacagcaagctaatatttcttaggtgcaaatatacgaagaagacttcaaaaaggaacgatcggatcgagagagacttaatcaagagaaagaggagctacagcaaattaatgaaacttcccaatcccagttgaacaggctgaattcccaggtacaagtcaaaacaaaataatctttgccagcatgtatgtatatttttttcatttaaaaaaattcaagacgtttggacttctgttaattgacattgaatttttttttaaaggtcagcacctgggatgaagtcattcttaaacaatcttgtaaagagatgaaaatgactggaaatttcttttaacttaagtatattaaggaattgcccaagaaattgcattccaaagttttttttaataaaatacagtccttttgatctttttctcataatatttatcttggtagaatgagagttgaactacctagtactcaaataaagtgaagtggtttttaaaattcttgtcattttctttgaagggctatgttggaatgctcctgtctgccaaaaacatacgtatttctaaatgccatttatatgtgagactgaggattttgttcagtggttcccagatgtaatgtaactggagtactttgaaggaagccagataatggtcaccagtttattaaaatagaatatattaaatgtaagcatactaaaattaagtgtaattgaacatattaaagtagactcaggaagttgccacgatgggtaaatagtgatgttaatgaaggaaaatgtagctaacataattttgccttaaaaaataaaacaaactgcaccatttttatttgtaaaatattgcaatacatttaaataaatagaacattgttatgagaatgctgtggcagcacttagcttcaagattcttcgtcataaaaaaatttaaaacagtcatcattttcttccaaatacaaagtggattgtgaattaaatttaattttatctctgatttttttaagattaacttgaaattcttaattttacatggaaaaaattgttttgcagaaccattttctctgtaagaaattagaaaaaataaaatagtagtaaaaaatcaaataattttatgaaagtaattcaggcaacctaataaataattcatacaataataggtaagacaatgttctgattactcttggtaaaaaaaaagagtatatattgtatattctctctctctctttttttttttatgagatggtgttttgctcttgttgcccaggctggagtgcaatggcatgatctcggctcaccgcaacctccacctcccaggttcaagctagtctcctgcctcagcctcccaagtagctaatttttttgtatttttattcttttaatgtgtttcttacatgcccaactactctaatttcttttaagttgtctctgcacaaactgttttacttgctgccagtaaaacagttttagaacaaaaaatatttgttttttaaagcaattttaaaatttgctgccagtaaaacagcaagtaaaacaactttaattttaaaacaatttttaataatttatttttatatgataaattatatatcaatatataattatatttaattaaataattttatttattctactatattaagattggtgatagactggcaatgtccttgccattacagaacttttagtcttgtcaggaatgtatatctatctacttaacgttgtatactataatccacaagtccttaactgtgtcacctgtaaagttgattggtatcaacaaaataaatgtattttctaaatgcagtatggtataattctgccttgaacctaaaggacaatcttaatgatatctaaagtgatagattaaagctatgaaattttttctttaaaataatgaaagctcaatcatttttttaaagtctcatttactcaataggagaatgatagaattcacagagatgtaatagatggtttgatgatctgtgttaaatgtgttaacagcagattaaatgctatgatattttaaaaagaactgacattaccttagttgaataacatattatttgttgtccaagtggacttttagaggaatatttaggtcaaatcattctggcattctgagttgctttcttaccagaatgtattcattctatcactgaggatgcgttaagtcagtgaaaataagtaatgtggtaaagtgaaagatgcttagggtacttagaaatatgagaatttagggggaaaagacttggtgttcctgcctgctctaatattccattggtggtaaccttgaacaagttatttaacttttctatgcttccttttcttcatctgtacaatgacaaagttgaactagatgatctctaaaatgcttcttattactctaaaatctctctctaaaaaataagttccttaacctcttttagtatacctgcctgtaaaatatagataatgaaacctaccttgtgacttcctaagttgttctcaatattaagtgaaaaaagcaaaaacaggccgggtgcggtgactcatgcctgtaatcccagcactttgggaggccaaggcgggcagatcacctgagatcaggagtttgagaccagcctggccaaaatggcgaaaccctgtctctactaaaagcacaaaaattagctgggcatggtggcacgcgcctgtaatcacagctattttggaggctgaggcaggagaatcacttgaacccaggaggcagaggttgcagtgagccgagattgggccactgcattccagtctgggcaacagagtgggattctgtctcaaaaagaaaagaaaaaaacaaaaaaacgctttagaaaacatttagctcaagtcaagtcatggctcagaggtattttataaattattttagtctattagaagagggggcatgtttaatagtttcatttagtttataattagcatggtactttcagttctttgtaatctaattttgatgctttctttttgcaaggcattctgctatatgctgtgagaaaacgaaaactggttcttgctagtaaataactcacaatatagtaaaagagacatgtacagtctatcctcatcatcacaaattctgcatatgtgaatttccctactgactaaaatgcatttgtcatccccaaatcaatacttgtggtgctttgtgatacatccttacatatgagcagagcagcaaagttgtttcctgacatatacacattcctagtgttctttttgtgatctatttagtgccatgtttcctgcatttttgtgctatttgttggtgatttcatggtttagaatggcccacacgtatatgctgtcatgctctctagtattcctaagcatgaaggatgtgatgtgccttatagagaaaaagtgtgttagagaagcttcattaagacatgttatagtactcttgaccatgacttcagagttaatcaacaatacatattaaataagttgtctttaatcagaaacacacatgaaacaaagttatgtattgatccattgacacaaatgttgtgacaagaggctagcagaaacttaacccaacatttctcctaggagcagtggttcaatattcactaattcagtgtccgtggtgactttatggaatatgaccaccacaagcagcaagaattgcctgtaaatagtacacattggtctaaaaaatcacacagtaaatatacaacactacataagaggacagaataattctgataagtgggacttggaaaggtatcattcagaaggggatatttgaccatcccttatgggaatgtgggacatggagtgtaggaatgacaatgatgtgaatgaacagtcaaggaaaagccagctttctctaaatgtgtcttaagttaagggaacccagggtaggtgattcatctagatgaggctgggccttaagtagtgagaagctgtgggatatagcagtgtgactttgaacaagttactcagaatcttatgtcttagtgttctcatctataaaattgagatagtattaagtatcacatagagggattgggagaattcagtgagttattgcatgtaaaaaatttagataagtttctgacatggattaagtgcatatataacttctaacgtttattgtggaagcctttgaatgtcaggttgacaattccaatgtcattcagtaagcaatggaaattgtttctatatctgtatctaaatagatctacctaaaacagaattgtaatggcctcaaaaaactggaatagcaatttaaaactatcacatttttcaaactgcaactggaaattttaagaatcaatgcatgtctgcaaaaaccaacttgtggctatttttgttggtattactgctgtcaatgcctgacacttgagtaggtcaagagtggcttgggaattaatgattttaacttgtcttgattaacaaatgcctttgttttgtctttagataaaagcttgtcagatggagaaagaaaaactagaaaagcaattaaaacaggtatgttgatctaattttcacgcatacatttattcccatgtacagcatttctcattgtcccaattaaagacatgttcaagctctgctacaggtgacctacaacaacccatgcttttcattactgactacaccatcaacggatagacagtgcttaggcaccaccaaggcctttcaaccctaacactcatagaaagcatatgctttatagagcatgttaccagtagcacaagtcttagtgctccttagacccacaagcacctggaaatagatttcattggtatttcatgcagttgctgacacaattaacagtagaaaactaaatcaaatactgcctcttttgaaaaaataacatgccttcttgagcactgaagcattctatcccatgggttctctaatagccttaaataatgaatattatttgtcctaattcctaatttcctttctggattttagttttccctggctacaatttaagaaaacctattttatgactcaatgaatagattttcttcattgagggccctcaataaagataactcaaaaacataaagttaactctatatacttttcaagtgtgtctaatttcttcaaaatggggaaatgattatagtttcaccttaggtaaaacttgacctgtgagcctcgtttgtattggtcctgagtctattgacatgtttactattttgagttataattatgccagattaagtggaaccttaagattgaaaccaaaccttttgtataaagcaatgtcactgcaactcctcagtctctcccactggtagtgaccccacagttttgttctcctcagatgtattgcccaccctgtaactgcggcttggttttccacctgcaagatccatgggtaccaacaggccctggagctgtgcagaagcaacgggagcacccagtaagtaagagtgcatttgaaaaagtgcttagtatactgttttggtagaaattatgtgcatctctggaatttcagcacattatattatctacagcaagagcctctgttttctctcagcctctaacttgcaaagttggagtggtcaatgtacactagaattatctttgggacactgaatccataggacacatagatacgaataaattaactgaaaggtattaaattgggaataattccttgaacaacatataacattttcaattggcatacttcattctacccaaaggacattttctgtataaagtgtatttatgtataaaggaaagtggatatggcaaaacaagaaaaatgagatgcttttgttcggttgtaaatttatattgaactactatggatattgctacatatgtgcaaaatagattttgacattttccaattgaaaggattttcttaaaggatccaagaaaaagtgacccacttaagttgttctccatggctgtgtcttcccagacaaaatgaaatgcagagttgagcaattatttgtgaggggaattgatttggacagtcaacctgaattagtgaggcccaaagcaccctttttttccttctcaatagcagtattccacctaccctcctctactttttattttgcctacatagatagaaatttatccaggaaaaaaatatgcattttctgcattttggatttacccagacaaatcccgctaccctttaggtttgattaattgtgtttctcatgatgaaaaaatctaagatttttaactgggattttcctaccagaatgcttacagagaacatgattctcttggcttcctgaaagttctcatacttttgttcgagtgtgactcaaaacccttttcccaagggaggagataatgactctttgggtggctgaaggaatgtgaggatttaatgagcatctcttatttgaccctggtatgacacagcacaccgctaagaattgagtcttttcatgttattgcgggttgctagttctgtctgctctccctcccccttttccttttttttctttacctgtttgcttacttttcagtctttaccaataacattaaatttttttttcaagaatgtagaagtcaactcagattgtgagaaacataaagagaaatttactgtaggagtgaattaacctataggagttggcttctacaggttgggggattggagaaatattcttatgaaaggttaactataaaaccaatcagtcattcacatttacctaggagtacaaattattgtttcagtcaaatatttctttatggaaagaaggaaggaattcacctactatagctcatcaaacagtccatgtcaattaaaaaaggcaaggcagtccaggtcacataaaattgtcaccaaataaaggcctatatttgaaaaaggactccaagccatgtagaatggcctacattttctttctttttttcttttttctttttttttgagaaggcatctcgctctgtcatccaggctgtagtgcagtggtgcgatcttggctcactgcaacctgtacctcctgggttcaggcaattctcctgcctcagcctcccgactggctgggactacaggcacacaccaccacacgtggctaatttttgtaattttagcggagatggggtttcaccatattgcccaggctggtctcaaactcctgacctcatgatccgcccaccttggcctcccaaagtgctgagattacaggcatgagccactgcgcctggccagaatggcctacattttcaagcagtagtcagatgaaaaaaatctcagcataacagtagagtttacaaccaaatcctcaaagttaatttaaaaataatatttcatgtttcttgtctatatcgaaggctgaattaagtcacatgctatagtgttggtaacattacaggatatttaccttctcttggcaactctcctggaatataaaactgaggctcacgtcacttatcctatgtgttatttgagacatctaaaaataaacgagaagataaaaaacagaggtgatctcatttcctcttctagctttttcataagccagaggagccaagggcctaggtgtctagagtaggggtacagtggggtcaaactgcactaaaagcagcatttctcagtgtcttattgagtaattgaactttctgggctactttcagtggtctggcagccttgtaaatgctctctgttggctcatgttagaaaaattttcctcaagttatttttaggagataattgaattacagaacaacaaaaaaatctatattctctgtgtcttgtggagaagtaggaggcaggggtgagcattcagagcagaaagacagacctgctttgtgggcaggtaaagctgagattgctccattcctaagcgttaaatacagaggtgctggccttggagatatcttgatgattcaggcctatgggtttactatttattcaatgcaatttgttcgacattcaatatctagctgttcttaactggtgtaaacctaggagaaaatcccaagagaaaaatcttgtctctgtagactaaactatatgagcaatttagaggataggttctgctggatcggttcttcacaacagcaaaaagggaaagatttgccctgcttcaccatcctgaacttctgtcaatgccaaatccccatttaatagcttaaatttcttccttaaaccattagaaaacttgtattaaactttttttcctggccttctcattgcctctagtgtgagggtctcaaaaagagtatttgttgatgctaagttgctttgttttattgatgggctgtagtaagttttacaagtgtttatacttctgcagatattcaaaacacatctgtttcaaaaaaagaaagaaaatatgtcacaacctcaaagtggtagaaattctggccaaacacagagtggatttaagagggggtagggagagatgatggcagtgatggggggtaagcaggatgagtgaggttggcaataggtttggatagaaattacttttgtgttgcctgcttaataaaagccacatagcctaattgtatttttgacatgccactatatttgaagtccatattgctataataatgttgtattgttccacacagccagactatcagtggtatgctcttgaccagcttccgccagatgtacaacacaaggcaaatggtgagaccacagctgtattgagcattctttcatgtttacatcttaatgggatcttttggggatgtttactcaacatacattcattcgtacttggggaggacttactataaagttgtgttacatacataactttaatttgatgcacctggggttaaattgaactccttaagacaaagaaaatgtgcgaatgcagaaatgcatgaacctcaattctggcttctgttcctttttcagtctcagagtcagaattccatctggggttagaaatgaaaactgtaagcagagctgtattataacaacaacaaagctctgcaattgtactacaaagcacagatgcacacccactattccaggttgagtttgctagacagatgttttaaatgtcactggcagacagacagaggaaaccaaaggctcggaactgtgttcccttatgactaaatgtcagactccaaggcagggctcttagtttaggccagggttgcccacaacgcccacctcaaagtatgctggggaaaactaaaagtcacttatgaagtactcacaactaagagtacttttttaaatcttattttttattgatttaacattttctgttttctttctagaatctgctatactttctactgcttgtttctatggtcttgtgaggccacccagaagcgggctgtataaactgagctataatcaaaatcccacttctattctcatcaagtatacataatcaaaagttagaaatgtctgctacatgtttaaagtctcatatgacacacacctgggactctaacttgttaatttccaaagatttgaatctatctaaaaatgctgaagatgagctatgtagtctaatttcaggccattcttgaaatttgatctcgtttgaagtcagagctgagatcacagaaatctagtttttaatacaaggagtctgttatggagtgtaaatagggagtcagggacaccacatgtagttttgcaggttgtgaactttacaagtctgaggggctcatcatggtactctatgtgaatggagcctgctgaagtacaatacgcaatctggacagctgtacacagcagcaatgggagtgacaaaggccatagattacaacagcatcatagaaaagaaatatgaaatgtgagaattccataataaaatatccaggtatttatcaaaacactataggactctcttttttctttgctttctactacaaatatagccagtggttttaatgaagttcttgagttccaacaataatggagttgttttattagaaaggcataccattaaccggaatgtgtgttgcataatatatgcaattttaaaatctattatggtataataacagaattgctacccaattataattttccattttatattgctctggaatgactattaaagatattttctttctgaattggagtttaataactggaaaataaaattacttagtacagaatttagtaataccataaggtcatttatatatcattattagattcttgctggaccaatattacacaagctaatgattacataaaatagaaatgaattgtgatgacattcagaaactaaatagaatatgcaataatgaaatgttgtagtcagtgtatgagacttactgatttttgtctagctaggaaaaatgtagtgagctttgtgatgtataaacataccatgtaacagtgtctacagatgtaaaactacaacaaaaaaatctccatgatgtaccaacctaagctttttttttttttttttttttcggagacagtcttactctgtcacccaggctggagtagtgcactggtgtgatcatagctcactgtacccttaaactcctgggctcaagaaatcatcccacctcagcctcatgaatagggctacaggcatgaaccaccatgcccagctaatttttatttttattttttgttcagatggtgtcttgctccacctccagtctgttgccaggctggtctcgaactcctggcctcaagtgatcctcctgcctctggctcccaaagtgctgaaatttcaggtgtgagccactacacccggcctgtttttaaagcattatttcaatcttcacaacaaagctatgaaataggttttgttttgcactatttaacacatgaggaaactgaggcttagagaatttaagtaacacgcctaaatcacacagttaataaaatttagcaaggggattagattatttgatatataggattctaaaacatatggtttgaattatatagtacagtgcccctcttactgtacctctctcactttattgaaattttctgaaagtatagatacaaaaatgagaaggggactctaacatagataataatatgactagcatttaaccctcaataatctcatctttgtgtgaactcacagcatgctactcatttgacatttagaatatcacaagtaaaaggcacggtactatgtaagattaagtgtgtaataaatatgttatgaactaacctgtgcatggacagccctggtggaacctgaccaggatatgttgtcatttgaaacctatccttttccatactaacacagctctgcaactaactatggctggccagcagcagagaagagggctgatcatggttagggcaccaccaaaaaattcctcactcaaaagtctacctgtttgggattcctatgcctcctttactagcttccacagttgatgtatttcatagcttaagccatgtcataagaattggcagaactctgacatcactcttgtcataaatgatggatgtgtcattatttaatttcagtagtggttcttgctggtttggggttcatttaattaaaacggtccttttaatctgttggtgtaactgaattgctcagaattctcataaaataattttgtggtattgactattaagaaatcactagtttaaggccaggagtggtggctcatgcctataatcccagcgctttgtgaggccaacgtgggcagattgcttgagcctaggagttcaagcccagcctgggcaacatggtgaaaccctgtctctacaaaaaaatacaaaaattaaccaagtctagtggcatgtgcctgtagtcccagctacttgggagactaaggtaggaggatcacatgagcccaggaggccaaggttgcggtgaggtgagatcacgccactgcgctcaagcctgggtgacagaaaatgactctatctcaaaaataaaaaaaaataaaaaaaaagaagaagaagtaacttcatgcatttgaaaaggtatggcagataatgagtgattaaatttcaatgataccactaaatcctcctctaacatttctggggcctggagcaagaataagtggagagctacatcctatctgtgtaaatctcatgaatcaagcatagaaactgttaaagtataatctatcctcctaccttgataaacatacatggaaaaccaaagtacaatttacaatgctcagtttcaaaaccagtctgtgacaggacatggtggcacagggagacctaagccctggcctcctgcctgggaccctcgaccttctctccccaccttcccatcataaggactcttgagtgcagacttgaagacagcccagctgggagatcccacccttgtccatacacccctcaccactctacacacaacactctttcgacagccttcaggctgggaagaggaccacatgaatcttggaagcaggcccagaatcacctgggcagggacttcggggatgtgcatttgggtgccaggaggagcttgttctggaggaaacgtcgctcacactgtgaggaagggtgtggctggaggagggctagagcagagtcctctataagatggggacatcagtgaagggcttcctgactagggactgagggtggtaggtgctgagtaccatggtgcacagacttccagtcaactaatttccagctttgctctcagttactgtctgtggttatttcagaatgctttggagacacattgaaaatcaacccttctttcaaaaactaaagattttaaatgaagggtttcgaatgttttcaagtcatttgagacttggctttctctctgtatagcattaaataatgatgtttttaatacattgaagtccacagatattaatgagttacagcttttgtttagaaacgtgattttacaaagaacattttcatcttgtttcatctgttatcagaacgagatgcaaaatgacttccatgtttatagaacaattatgtcataacagagttagtttaaccttgaaaaacatgttgtttgtttcttcctttctgaaatgtcaaaaagctatggtttctgattgcattgcatgccagtcacttctgtacattccaaatttttcatagggtacagagttatgctttgtctaatgagccagagatggattattaatgtatctagaaaggcataaaatgtagggatgtgaaactgtgttgtgaaattacttctttacaatatagaagatcaaagcctaaatattatgattagcttttactaatgtctaatactaaccaattaaatactgactggatttgtctcctaggattgccataacaaaataccacaagctgggtggcttaaaatagaaaaactttttttttcatagctctggaggttagatatccaaaaatcaagatgttggcagggccaagctccttccaaatcctctggggaggagacttccttgcctctttcagcatctagtagctccaggtattccttagctagtggcagcatcactgcaatctctgcctcggtcttcacatgaccatcttccatctgtgtccaaattttcctgttcttacacacacaccagttacagtggattaaggccctcctcccaccttcactgtacatttagggaaattctgccttcccttcaagaacctaaagacctatctttgtttttgttcagatttccattctgccgtggattatctcattggccacagcctctctccatctaaaatatcaggctattgatctttaattctatgcctgtttcacaagagcactgtacaaattgaaaaggagttaattttaaaatatttaagatacctagggagaggtatcattagtggatttatttaatgttaacttcagattggttagatcaattaatttatgcttctgagttcaaatttatgttctcaacatattagatacctttttaacatagtgaccacagtcctcagcaacataatttttcagcctggaaaagtaacttattatcttcctatttgctttttctgttaccaaaatgttagtttagcacatctttggtataccaaatgaggacaacaagtacaaaacattcagcatatttttaagttatcagggataaggataactctttgtttcttggcatttctatgattattttttcctgttgccatgagtaaacttatttgactttgtctttcatgtagtattcattatcaaatagtactcaatcaaaatattccagatttttcatattggtcttcatgatacaccaacaagtctttctataggatattttccatagctttggcaataatgtacccagtaccatatattaaaagatcatatttggcaagttttctttctctggggtaagtactgaacctaacctaagtcatatatatgacttactttcacatgcccaagccaaaatgccagcaagagtgagaattagtatagaacattcctcctcaggcataattagaacgaggccacaacttatttcacaaaatggtaagcatatgtcaatgcttaaaataataaccctccatctcccgcttcttgatttctcagtgtaaacttgtggggagcttatgaatataacataacttttttttttttttgccatcctggaactttatgtcagccttaagccagaagaagagaaatgaaatgttaatttttaatctaaaacattttcctactgttttccataggtttatcctcagtaaagaaagtccatccgtagaagtacacactaacagagagagacaacaggcaacgagggagcgtggctgaggaccctcttctttgtttatactgaggcttgtttctgccacaaaggcacatcatctaccctgttatttgtgcctggtcatgttttcctttggtatgaatacaggaaaaggcttctgacagctaagatcctgatcaaattggaggagccagttattatacaaccaaatacaacttccagtttccttgaaatgagacttggcagatggatgatgcacgactccctgaaaatctcttcagcatattgctgttggatgcacaaaaatgattctatgatttaggcaactcagtgtttgctgcagggatattgtatgttgatttaaagtgcatatgtgtgtgtgtgtgtgtgtgtgtgtgtgtgtgtgtgtgtttcctggggtaaaaatttctgcagttgtaaacgtttaacattgctcccattcttcttccacagggccttagttctttagctatttgactacatattgttgacctcagtgatcctaaacgtagaattgaagaggtgtatatacctcattaaattaaataagtggttcaatctgaataagatggttaattggaagctattccttagacagatcatttctttaagatgatgagaaattgtgcgcctgcatcacaagacttgattatgaaagataaagtcttgggctgggtgcagtggctcatgcctataatcccagcactttgggaggctgaggcaggtggattgctttgaggccaggagttctagaccagcctggccagcatggtgaaaccccatctctactataaatacaaaaattagccaggctcgtggcacacacctataaacccagctactcaggaggcttgaggcgggaggatcacttgagcccagggaggcagaggttgctgtaagttgagatcgccactgcactccagcctgggaaatagagtgagcaagactcagtgccccctacccacccactccacaccaccaaaaaaaaaaaaaaaaaaaaaaggaagacaaagtcctgatgggatgatgatggctatatggctatgctgtgtccatatatacttacagaaatatttcagacatatggatttatagttaaatctgtgtttttccttcccttggatttgattaattttaatgaaaaacttaattctgacttctcaagccaattaaaatgaaaatggaatttattgaaa

SEQ ID NO: 36 - DNA, 11826 bp, Homo sapiens
aaggaagtggtttattcggcccggagcgtcagcagactcgcgtctttaagagccgagctccccgaaaaagaaattcttggcctttttaaaggcttacaactttaaggggaccacgtgaaagggtcgtgataaatcgagcaagcgcggggaacgtgactgggggctacattcatcagctaactgaacaggaagttttgcaatgctttttcatacagtgcctggaatttacaggtaacacaagtagtttaggtcaggagttgatgtcattattattacttttttttttaactcctagggccgggtggtggtgccaaggttgtctggctatttatcttacttctgtttctttcccactttttgctttctcactttcctcctgtcttgtgaactaggcaaggtgaggaaaagagggcagcaggagtaatagtggtctccttccttactatggcttctattactgtctgaaagaaactaaagtgtgggctaatggtatgtactatgatccatttgataattgatatcaactttgaggaggaaatgaggaagattatattgacctagggaaggggggtctgatttctatttccagcttcagtctttatagtttgacactggcaaagtccaatgtctctctggcttcagtgtcttcatctttctttcttttcctctttttttttttttttttttcaagacagattcgctcttgttgcccaggctggagtgcaatggcatgatctcggctcaccgcaacctctgcctcccaggttcaagtgattctcctgcctcagcctccctagtagctgggattataggcatgcgccaccacacccggtaaatgttgtatttttagtggagaaacatgagctttaccattaattataaaaaacagttttcatgcttccacaataagactgtgtttacatataattgtaattatttctatgataatgatttatgtaaaatgaatacggcctgtaccccgtactgctttgttttacagatatttgtgtgtgttttaactataatttcacttgaattaagatatcatgttctcggccaggtgtggtggctcatgcctgtaatcccagcactttgggaggccaagacgggtggatagcttgagtttaggagttcaagaccagcctggccaacatggtgaaacctcgtctctactaaaaatacaaaaattagccaggcatggtggcaggcgcctgtaatcccagctactcaggaggctgagacaggagaatcgcttgaacctgggaggaagttgcaataagctgagatcgcaccactgcattccagcctaggcgacagagcaagactccgtctcaaaaaaaaaaaaaaaaaaaagatactatgttctagtattaagtagcttccacataagacccttgtcatatcttttctgaaaaaaaaaaaagtctaagacactgtgactctgctacacgcaggaattagtactcattaggatgtatctgagatatttcaaaagaatcgctgaataataaattccagtgcaataaatagcattctaataaattaggtttgaaataattttgtaatgttaatctcatttaacacatttattgactgaccaaaaaacctcccaaacaatttaagtcacattttagaaagttttttaaaaaattattattattattttttgagatggggtttcactctgccacccagactagagttcagtggtgttatcatggctcactgcaacctctatctcccaagctagagcagtcctcccacttcagcctcccaagtagccagaaacaaaaggcgtgtgccaccaggcctggctaatttttgtagagaaagggttttgccatgttgcccaggctggtctcaaactcttgagctctagggatccgcctgcctcgacctgccaaagtgctgggattagaggcatgagccaccgcacccacccacattttagaaagttttaaagggacaaatatgaaatggtacatcgatcaaaataagcacaaggaaatgcaattctagtcaatataaagatactaaaaatagtttatttatggctattaaatggagaagaaaagagatctgtgattaagacatgagagagagggaggagaagagacaacaggaatggaggaaggagaaatgaacacagactatagggaaccaagagtagtcgtaaagaaagaaaaagcatccatgggctggggtgcgtgttaagatgtaggtacatggagagttccttttttgttttgttttgttatcagctttattgagatataattgacctaccataaaatgaccctttttatgtaaacaattcagtgtgtttttagtatatttatagggttgtgcaaccatcaaccatatgtatttataaataaaaaataaaaaacaaaccacataccccttagcagtcactccccaatccccttcccttccctggacaccacaacccagccctaggcagtcactattctacttctcctctccatagattcaccatttctgaacattttatgtaaatggaatcagacaatatgtggtcttttgtgcttggcttttccacttagcatagtgttttcaaggttcatccgttttgtagtttcttttttcttttggagaaagagtcccactctgtcacccaggctggagtacagtggcacgatcttggctcactgcaaccttcacctcccaggttcaagcaattctcctgcctcagcttcccaagtagctgagattacaggtgcaagccaccactcctggctaatttttgtatttttagtagagatggggttctgtcatgttggccaggctggtctcaaactcctgacctcaagtgatccgtcttccttggcctcccaaagtgctgggattacaggtgtgagccaccatgcccagcttcattttgtagtttctatcagtatcttattgctgaataatatttcgttgtattgatttgccaggtttaatttatttatatatcagtttataacttttgggctgcttctacttttttggctattatgaataatgctgctacaaacattcacgtacacatttttgtgtggacatatattttcatttctgttgggtgtaaacctgggagtagaattgctgggtcacatggtaactctctaattaactatttgaggaattgtcaaagtgtcttccaaaatgactgcaccatttttttatttccatcaacaacatataaggattccaatttctctacatcattgccaacacttattatttgtctttttggttatagctatcctagtggatgtgaagtggtatgtcatggtggttttgatttgcattttcctacttactaaaaattttgagcatctttttatgtgcttgttggacatttatttatcttcttaggagaaatgtctattcagctgttttcctcattttttaattgggtcactcatcttcttcttattgagttgtaagagttctttatatattctctatacaagtaaatgtcccttatcatatatatgacttgcaaatttttcctttcctttctatgcgttttcttttcacattctttatagtgtcctttgaagcataaaaatgtttagttttgatttggtccagttcgttaatttttaattttattgtttgagcttttggtgttgtatctaacaagtcattgcccaacccaaggtcatgaagattttctcctatgttttcttctaagaatttcatgtttttaactcttacattgagatctatgatccattttgaattaatttttatatatagtgtgaagtaatggtctaactttattcttttgctgtgaatatccagtagttccagcactatttgttgaaaagactgttcttcccccattgaatggtcttgccaccctaacacaaaatcagttgaccatagacatgggggcttatttctcaattgtatgccattgatgtgaacactcatgcaattttcacatgtcttgatttagtgtgattttttagtaaattttgaaatcagaaagtgtgagtcttccaactttattcttcctttttgggattgttttatcaattcaaggtcccttgcaatttcacatgaatttgagtattggcttttccatttctacaaagaagccagccaggattttaatagaaattgtgttaaataggccgggcatggtggctcacacctgtaatctcaacactttaggagtctgaggtgggcggagcacctgaggtcaggagttcaagaccagactggccaacatggcgacaccctgtctctactaaaaatacaaaattagcaaggtgtgatggtgcatgattgtagttccaactacttgggaggctgaggcaggagaattggctgaacctgggaggcagaggttgcagtgagccgagattgcgccattgcactccagcccgggcaacaagagtgaaactccatctcaaaaaagagagagagagagaggaaaagaaaagaaattgtgttgaatagaagcggtgagactgaacatccttgtcttgtccttgatctcagggaaaaggcagtaagtctttcaacattgagtgtgctatcagctatgaggcagtcatagatgacctttatcaggttgagatgttctctgctattcctagtttgttgagtgttttgtcatgagaaggtgctggattttgttagttacttttcatatagtttttatttttattcaattaatttgtagtattacatttcctggaataaatcccacttgttatggtgtatggtccttttactatgttgttttgtttttgtgtttgtattcggaaaggacattggtctgttgttttcttttcttgtgatgtgtttatcttattttggtgtcaggataatactgtcctcatagaagaagttgaagagggttcccttctcttctatactttgaaaaagtttgtgaagaactggtattaattcttatttgaatgttttgtagaattaaccagtgaattaatctggtcctgaggttttatttgtgaaaaatatttggttatcaatttgatatctttacttgttatagctctattcaaattttctattttttttttgagatggagtcttgctgtgtcgcccaggctggagtacaatgacacgatcttggttcactgcaacctctacctcccgggttcacgccattctcctgcctcagcctccctagtagctgggatcacaggtgcccgctaccacaccaggctaattttttgcatttttagtagagacagggtttcaccatgttagccaggatggtctcgatctcctgaccttgtgctccttccgccttggcctcccaaagtgctgggattacaggcatgagccaccacgcccatcccaaattttctattttcttcttgaatcagggtcaataatttgtgtctttcatctctattcgtatcagctgtgaggtggtcatagatgacttttatcaggttgagaaagttctcaactattcctagttagttgagtgtttttgtcatgacaacgtgttggattttgtcagttgcttttcaaatcatttttattttttatttgattgatttgttgtattacatttcctggaataaatcccacttggttatggtgtatgatctttttactgtgctgtcggcatagtaattttatttgcatacagtttttttttttttttttttttttttacctccctttcctttgtttggtttggtctagtcaaggcttgttagttttgttgatcttctcaaagaactaactttcgcattcgttgatttcctctattgttttgcattctctgttttatttattcctgctctaatcttcatttccctccttctgcatgctttgggtttagcttgctctgcttttctctagtttcttaaggtagaagtttgggttattgttttgagatgtttctttttttttttttttaatgtgagtgtttacagctataagtttccttctgaggactgcttttgctacatcctataagttttgatatgttgtggacttttttttacatttcaaagttgttttctactttctctagtgacttttcttttgacacattgttgttgttgttgttgttttttcctttgagatggagtctctgttggccaggttagagggcagtagcgtgatctcggctcgccgtaacttctgcttcctgggctcatgcgattctcctgcctcagcctcccaagtagctgggattacaggcatggactaccacacccggctaatatttgtatttttagtagagacagggtttcactatgttggccagtctggtctcgaactcctgacctcaggcagtccacccacctcggcctcccaaaatgctaggattacaggcatgagccaccactcctggccagacacattggttatttaggaatatgtggtttcctttctgtctgttactgatttctgatttaattccattgtggtttgaatgtatactttatgtgatttcagtcggtttacatttactgagacttgttccataacctaccatatgctttatcctagagaacattccatgtgcaactattctgttgatgttggatagagtagtccttcgatgcctgctaagtctatttggcttatagtgttgttcaagtcttctattttcttgtggatcttctgcctaaattttattaattagtgaaaatgtggtaccaaagctgtcaacttttattgttaaatttcctattctgctgggcacggtggctcatgcctgtaatgaggtcaggagttcagcctgggcaacatggtgaaaccacgtctctactaaaaatacaaaaattcgctgggcgtggtggcacgtgcctgtagtcccagctactcaggaggctgaggcaggcgaatcgcttgaacccaggaggcggaggttgtagtgagccgagatggtgccactgcactccagcctgggcaacaagagcaaaattctgtctcaaaagaaattataataataaaataaaataaaatttcctattcttcccttcaattctgtcagtttttgctttctgtagtttggggtgctactgttaggtatatatatggttataggttttacatcttcccaatgggttaattttgtgttaccatgaaagtccctttttatttccggtaacattaaaaaaaaatctattttgtctgatataggcatcaccaactccagttctcttttgtttactgtttggtatacctttcttttgatccttttactttcaacctatttgggtctagtggagagttcttatactgccttaggttagggattcatattacattatcatcattagtactgttatttgacatttgctgtgctgactagctactgctgataggttttctttcctcaacaattctgaggctctatattgagttatattagtacatcatcatggagagttaaaggtaggtaaggattattttctgaactgcaatattgattaaagccatgtgaatgtataagattcttagaagagttgacattaaatcaaggtgaagctgaggtttgagccttacttaaaggctgatattttccactctaactgcggacagtactgtagcactgttatagtacctgctctgaatgttagtctagcaactcagggtcttcttcatgacagctgaacctcaaccatgtgatggtaaatgtgtagcagagtatgcctggcatcccacctgctcctcctccccctcctccttgactggttctggaaagcaaatagggtgtaacaataggagttctggaatgttcctgtgtggggctgacctttgtatcgctgttaatcctctattttcagacacaaaaatgattaagttaaaactggatgaaagtcttttctgggtcacagggctgagctgcttttgctctttgcaaatacaaagaatttaacaggattctccccttctcaacttcctgtcccccaccctgaccttcgcaccttcccaatatgaggaaaaagcaggaagttttccttgcgggttttttttatgatgacatgatggggccagttgatcaatggggaaaaccccatgtggcaacacgccttctgtgtacattcccaatatttgctataaatagggccatcccaggctgctgtcagaatataacagcactcccaaagaactgggtactcaacactgagcagatctgttctttgagctaaaaaccatgtgctgtaccaagagtttgctcctggctgctttgatgtcagtgctgctactccacctctgcggcgaatcagaaggtaagtgtcgctctttccgctagcacagaagaaagactattttcattttccttttagccttgagctcaactgggggtccctaagggatggaaaactgttaggaagtatacaagaggtagtgatggaagttgtctgcccatggtggagtggaggagagaagagttactgctgcggatcaggctttcctctctgctgtcaatctcagcagatttggggagtggtgggctcttagagatccctaaacttcaggataaagccaaagtgatgtttctgggagtgatataaagtgtgtaatgttaccagtagatggggccattttgaaatgtagagaatcctcctgtgtccccaactttcgtacctcccaacttaatagttttggtaaagttcaaaactcatcctttagaagtagattataatacctgacatcaacatccccacaaggcatgggggacattgcttgccaactttaaaataacattaatcccttaccttacagcatgttgtaatctgactcgggaatgtccaagtattgctttattgctcaatagtcacacaacacttttagcaacaggtgcattcctaaaaatgcacattgaatttttttttttttctgaggcagggtctaacttcatcacccaggccagagtgcagtggcatgattacagctcactacagcctcaacctcctggagtcaagtgaacctccagtctcagcctcttgaataacagggaccacggccgtgtgccactcacctggctaatttttttacattttttttttttttgtagagacagggtttcactgtgttgcccaggctggtctcgaactcctggaggcaagcaatccttcctccttggcctcccaaagtgctgggattacaggcatgagccaccatgcccaaccacatgttgaacttttatgaacaaaattaaacattcctattaattaataggacaatttcaaagtgttttcactcctataaatcatatttccctttgtagctctatttctcaatacttagtagccagataatagattaaaatctgccaatttattcattttctgcttttggaagtttatctacataagggttccttcaagcagtagggaaggggctgctcatattcttgaatgattatagtgaactgaaatgaaatattgtcaatttgtatttcttactgaagatatcccacttatgagaagtcctgtgtttctcaattctattattgaaccaaaacttctcggcacacaaactgttttttcaaagaactgtaaactatgttagattggttctcaacgaccttacaaaggtttccaagacattgaaactcctcctctaagtggtttattcgtcatatacatgagattcactagatttttcacaacttaaggtagttttataataccaatcacaggataagtttattcatgtggatccaatacctttcacttttttttttttttagcagcaagcaactttgactgctgtcttggatacacagaccgtattcttcatcctaaatttattgtgggcttcacacggcagctggccaatgaaggctgtgacatcaatgctatcatgtaagttattaattgattttaattcagttgtatcaggaatacctagaaacttcagttttaaaaatgtttgcctttttagagtttcattcagaaattactgatgttttgaacataagatcttattttaaagagaaagaaatgatgtggcaaagatagctttgtcttagtacatatctactttaaagttcactttaaacaggactggaataaggcaaaaccttttttaaaaattttttttggtcaaacggaactagtatagggcaaaaatcactttctaaggctattaaagtgatatattaggaaaatagggaagatacacatttcgaaatgagcatcttctaccagaaagtgtttgagaccaaaagtaaaatctcagactaattatactatcacatataattttcttgatttatataggatattatattttggaattatacaagttattgatcagatacatacatattctatgtaaccaccaatagcaaaattatatgacaattctgggactttatcttcctgccattgtactattatttgttacattgcagagaaagagagaatcactttgattttgcattaatcttcatcagaagcattttttgtgcattttattttacctcatcaactgaaatgtttagtgtgtaatcaactggaatataaaatttccattgtatgttctatgaaaaacccattgaaaagctcattaaacacaaatcaaattttctgatttttcagctttcacacaaagaaaaagttgtctgtgtgcgcaaatccaaaacagacttgggtgaaatatattgtgcgtctcctcaggtatgttacactgacatttagcctttgcaaatgtttgaggaaagaggagtgtgcaaaggggtgggccgtaggttttctgggattctttagtttaactattgtggaatttttaaagggaaaatttgagttggaccacaaaaacaaagaatgcatttttccacttacagatcatcatcgttattattattttaatttagtgatttcttacatgatgtattagatttctctatgcatttgatagttactagctgcctgattcttgttgcaaagatgcctactatttatataatttaaaggcaatctggcatttggttgtttgttaaaaactgaaaaatgaacattagttaaacagagatcaatggttctgatttacgttgacaataatagacagtaacactttatcaatggacagaaggcacctaacaccagcatgccatagatactgaacttggagacacaagataagtgtccatagcctgtttctgtcattaatgagctgagttaggttgggcaagggccatcctctctaaacctcaatttcctcatctgaactctgagctgcttgacatactgagttgagattaagggcaggtgaagcaacctttaggtaccaaagtcattcccaccatgcagtcaccttgtcattacttacacttttcttctttttcattttacagtaaaaaagtcaagaacatgtaaaaactgtggcttttctggaatggaattggacatagcccaagaacagaaagaaccttgctggggttggaggtttcacttgcacatcatggagggtttagtgcttatctaatttgtgcctcactggacttgtccaattaatgaagttgattcatattgcatcatagtttgctttgtttaagcatcacattaaagttaaactgtattttatgttatttatagctgtaggttttctgtgtttagctatttaatactaattttccataagctattttggtttagtgcaaagtataaaattatatttgggggggaataagattatatggactttcttgcaagcaacaagctattttttaaaaaaaactatttaacattcttttgtttatattgttttgtctcctaaattgttgtaattgcattataaaataagaaaaatattaataagacaaatattgaaaataaagaaacaaaaagttcttctgtt

SEQ ID NO: 37 - DNA, 10127 bp, Homo sapiens
agaagcccagtagacaaagaaggtaagggcagtgagaatgatgcatcttgcattccttgtgctgttgtgtctgccagtctgctctgcctatcctctgagtggggcagcaaaagaggaggactccaacaaggatcttgcccaggtaattaacggtggcatctattgcagctactggccagctcaattgtgtctacttggtcttccaatacaaagcagaatgattagactagagatcactttgttagaaaactgtagcatcagagaataattaacaggctggaggtggaaattatttttatgttaacagagaagaaaagaaaggttcagaaagggaatataactgctcaaggttacaataaaatagtagcagtatatttgtggctaagtgaaaagaacatatggagaatatatgaaactcctctggctttagaatttatttagttaaaattattggggaggggagcatgctaagtttgatctttaaatcatatcaggtaatagttttcatatttttacttgtcatatttggacaaaagagtttaccacacttcagtcttaaaccaggtctataataacaatgtaagtagaaaaggttagtattctaacttttcacaaaactatgttaaaagagggtttctttaaaaactaacaaaaataatgctagacttgaattttcaatccccaattccttacttgactagcaaactaacattgcaataaaatttaaaaatttgtatgaaatggggagtcttaatgaaaaatcaaattaaatgtgatagcctcttttgttttaagaaactagaggaaaattacgatggattataaaagttggataaatgatggaaaatcacaaaaatgccctaaaaattctattttccattagcaatacctagaaaagtactacaacctcgaaaaggatgtgaaacagtttagaagaaaggacagtaatctcattgttaaaaaaatccaaggaatgcagaagttccttgggttggaggtgacagggaagctagacactgacactctggaggtgatgcgcaagcccaggtgtggagttcctgacgttggtcacttcagctcctttcctggcatgccgaagtggaggaaaacccaccttacatacaggtaatggttcagattagttttcacataatattgaaaccttataagttactcgtcatatttggataagtaacataaagttttctttaacaatttttcataaaggcaggagaaaataacatcctcttcaatttttctcctccaggattgtgaattatacaccagatttgccaagagatgctgttgattctgccattgagaaagctctgaaagtctgggaagaggtgactccactcacattctccaggctgtatgaaggagaggctgatataatgatctcttttgcagttaaaggtaatcaaataaagcatccatttatctggtgtattcatctgttcagactgctatagcaagttaccttagactgggtaatttataaacaacagaaatttattgctcacaattctggaggctgggaagtccaagattaaggtgccagcagatttagtgtctgatgagagcctattcctcatagatggtaccttctgtgtcctcacacgatagaaagggccaggaggttccctcaagcttctttcataaaagcactaatctcattcatgagggcagagcacttacgacataatcacttcctaaagacctaacctcttaatactatatttcattgggcattgagtttcaacatatgaatttgcagcagacaccaacattcagactatagaatctactgttgtttaattggaacagggtaaaaagaaattctgaacacttatatttccattaatttgttccctatcagaacatggagacttttactcttttgatggcccaggacacagtttggctcatgcctacccacctggacctgggctttatggagatattcactttgatgatgatgaaaaatggacagaagatgcatcaggtgggtcgtaaacctctcgggaacatttcaggaataatgtccaatcctacccaaaaataattggattatctagaacgagcaataaatcgaatatactagtaactgaatttttttattacctgagttttaaacagaagtactgtttgtttcaatcattattgaagaattttataaaatgtctgtattttcatgtttgcccccaccaagtacaatattgtaaaaaccattcaacctcatctccacaactcaggatcttgtgggggtttgaggatcagcataattaataatgtttttcatcactttaatgatagatgattaggatagaatgaattccattaaaccagttccaatcctaacatttgccctcaggttttctttctttcttctcattggcctcctttttacttaaaagtagagatcaggagaaaatgccaggaactgaaaaaaaactgttaggtcatcttttcgaataaacatgtcactgtctctagcttagatgggtttttttcgccctaaattggcttggaaacactttacatctaaacataatgactaaaattaactgtatgctatttaatttttaaaatggcttctgaagtttagaaacacactgttgaaataatcactatttctgacagtgcctgggatttttaatgtaaatgcaaagaacatctttcctgagtacaagactcaggaggctgaggcacgagaatcactgaacccaggagatggaggctgcagtgagccgagattgtaccactgtactccagcctgggcaacagagtgagactctgtctcacgagactgaagtttgtgttgcatgaaatgattgccttttatttgaacaactgttcttttctgcacaattcttggagccttggttaaataatatctactactaaattcaataaaaccctttttataatatttttaaaaagctgaatctagctgtgtttgtgctgcagaaaactgttattgggcatgtttctgttttaaactaaagattgtacacatccaatggcacctattactgggaagatttttgacaatcaaaaattatttgattatggccaggcaccagtggctaatgcctgtaatcccagcattttgggaggccaagttgggtgaatcacttgagaccaggagtttgagaccagcctagccaacatggtgaaaccttatctcaacaaaaatacaaaaattagccgggcatggtagcacgtgcctgtaatcacagctactcaggaggctgaggcacgagaatcgcttggacacatactccagcctgggcgacagaatgagactctgtctcaaaaaaaaaaattacttgagtatgatgaagaggaggaagagaaaatcagactaaaccccacaagaaataaccacagtcttctggcttaaaagtttgaacgtaaatgttatatgattaattttaaccaaggttgcaactggcaagtgttcctaaatttgaacaatgactttttatttttagacaacgaagagttatatttactgacatgctattagtcttgtcctttcaaaaaaaaatcttttgaaaataatgcttctcatttgtcaatataggaaaagtgtcttagttttcctgaccaaggagggatctagggagggatacggtgaaaaactgtcttatatattgacttaaagtcaaccttgaaaaacacattaatttctataaagtatggaatgtgccaatcaatgaaccaatccacaaatactgaaaagacattgtggtttcaaggatggcctgtacagctggcatatgttctgtatgtgtatttatggaagaaagagctggtgaattctgaacatttatgattttcatacaggcaccaatttattcctcgttgctgctcatgaacttggccactccctggggctctttcactcagccaacactgaagctttgatgtacccactctacaactcattcacagagctcgcccagttccgcctttcgcaagatgatgtgaatggcattcagtctctctacggtgagtgatgctggaaaaattaggcattgcagatctacaatgacagtcctccagaaagctttccagtgctacctaaagtatttctgatttggcctgaagcactttgagaatgtttgaaaggcacacaaattgacagatgcatcacatttttttttaatgtttgcatccccaaatctgtttcctttaggacctccccctgcctctactgaggaacccctggtgcccacaaaatctgttccttcgggatctgagatgccagccaagtgtgatcctgctttgtccttcgatgccatcagcactctgaggggagaatatctgttctttaaagacaggtcagaccagaaaattatattttcctatctattcttttgatgtacagtgcttagaaagaaaaacagaaacttgacagagctttttttttaattttaggttcaggggtacatgtgcaggtttgttatatagataaactcgtgtcacaggggtttgttgtacagataattttgtcaccccagtactaatcctagtacccagtagttactttttctgcttgacagagattttttaaaatataaaatttcctctacattttaaaatcattcagatctagttcttgctgaatttttaacatcttcttagaattgtccagatcattttttacagacttataagggatgattcttggtccctagactgtaagtttgattaaggcagggagttatatctgtttcgttcatttttttaaaatatcatatatcatggaacttcttcagaaagcactggtggatccttagaagcagggtggtatctttccatttactaatatatgctactatttaaattaattacttttggaaaaaagtgatatgtgcttgtggcacaatatttaaacactaccaaaagatacggagttaaaaaatctctctccagtctttggcctaccgtcctccagctcccttcatatgtgcaaccactgctaccaatttcctttgactctttacaaaaatgttctactcatatacaagcatcaatatacacataatattttttaaaatattaggacataatatgcacactgtttatggacttttagaatggaaccaagctaaataattttactggaaccagtcacaagtcctgccatcgatttcattaccctggaatcacatgcaggaggatggtttaatacagacttctatgaatgggtgaattagcatggatttaaaaaaaaagaatttttttttcacatatctaaaagagaaagacaattgcaagtaattttatgtattacagatatttttggcgaagatcccactggaaccctgaacctgaatttcatttgatttctgcattttggccctctcttccatcatatttggatgctgcatatgaagttaacagcagggacaccgtttttatttttaaaggtgagtactatataagaatttcaacttgctggaataaatcctattgcaaaaattttattgacatgagttttatccattatattaaagtttagattactgaaagaccttgtgctaacacttaaataaaatttgtacaaagaacattataaactttattttagagacctcttaagaaaataggtggcattccatattcataaaaaatgcaagatagtaaaaatgtcaatttatctatagatacaagacattttcatttcaaataccaaatgccaaaagatttttcatggaacttgacaaattagttttacaatttatatggcagaggaaaggccaagaatagccaggatgctcctggtgaacccatcttattagatgaggagaaaagccctgtgttataaaactttaatcggtaagatgtagtatcagtgcagggagagataaattaactaatggagatattcaggtatagaggcttctttatcagacttttaaactactgtttcaatttgttttattggtaatatgctattagagtttctattacttcttgagtcagttttgttaacatgtttttctaaaaatttgccaattttgtctgttttcaaatccatcagaaaaagtttttggaaaattattttgttgtaatttgaattattgctgaagttttgttttctttttcattcttaatactgaatccttttgcctttctcttttttcttcatcaatctcataatatatgtaataattttactgatcttttcaaaggactgacttttggctttatttactctctatattatattttgatttcccgtttaattagtttctgttcatatctttattgttgccttaatttttgtttactttgaattgatcctgttattattgttatagcttaagtttgatacttaccttattaacttgtaacttttttcttttctaatacaagcatttatacctataaataaccatttcttctgtttcatccagcaaatttcgatatgcagtattttcattttgttcaattttaattctttaatttctcatttttattttttccctagactcataggtgataatggaatatttttaaatgtcaagctttatggagattttaaaaatatttatttctggcaatctcacttatgtgaagatcaaatgaatgtgaaattgcagtagaaattgtaaaggattacataactctaacgtattgttatcaagtaatgtatctcacatttacatatcacttgcactgtgtcagacgccattctcattggtggaggtcaggactgaaaagggctcatattctagaaggggcagcagagatgaagcctttggcagcctacatatgacaagtgctgggactgagagaaggaagggtgccatgggagcacctgactcatacccaggactcagcaaagatcccttaggggaggtgatgttaggatgggtcttaaagttctctattgttgtgcagagatgggctgggtgtacagaaagtagaaaggtctttaagaaagaagaaattgtttttaccaagtaagagcatatctggaactgctcagacagatacaagtcattcggttcagacgaagcaagagagataaacaacagatggacattttagattagtgaatctggcagtgagtgcgaagaaggaattcaggcttggggtctgggagagtgatgtaacaaagtaaatgcagagagattgatgggattttattgtcctaactcactagaatttgaatgaattccgatagtgttcacaagaagcacagattggaattggtgactgtgaaatatctcaaaggaagtgtccaataagcaactgatctattggtatgaaacttaagagagagaggtctaggtgagaaattcaggttaaaagtttaccaacaattataagaaataactaaaactgatctataaataaactataacatatagatacaaatatataagacacagaaagggcagtgaatcagagttatctactcatttattcattcattcattcactcgctcattcagggagtatttattaaggactggctgtgaactggacattattaggttggaattaaaaccaagccttcctctttaccacaacaatgcactataattatttttaaaatcaatggcttcaagtaaaatgtcttggatttattttttcaataggaaatgagttctgggccatcagaggaaatgaggtacaagcaggttatccaagaggcatccataccctgggttttcctccaaccataaggaaaattgatgcagctgtttctgacaaggaaaagaagaaaacatacttctttgcagcggacaaatactggaggtgagatgcaagagaaatgactttctatgaagcctgattaagaaaattattttctttctttaaggatatttccctaccctacacccaccctctaactttctctaacttcaaaatttatgattatgaggaagacagcttattgttctaccttccggatacaaaggcctctcagaatggtgatcactgggccatatactcagacactaaaagacatcaggagaggccagctgaggtccaaaggcattcacctcttattccatttccagtcaccatgtggctgccataggaagcccaggtgtggcaggctttggagacaggatctacagggtcccagtgtgactgagaaccagaggtttatttttagctaagtgatttaattaattttgcattatgaattcattatgtctacacagtctttatgtatttatagtagacacagggaaatttggtttctgtgtgtccaggcttagaaaatttacctcagacatatgtatggaacctctgtaaaatggcataatgttcctgtttctggaaaatattgttttatgtgttaaacttgtaagcccaggaaagtaacctattcttgtagctctaaaaatgtttaacacttttttacacaacttaaaaagtttgtctaggattccacactggaaaattaacatcacattatactattgtgtgtaatgggactactgcacatcattgaactgtatttctttcatttggtttagatttgatgaaaatagccagtccatggagcaaggcttccctagactaatagctgatgactttccaggagttgagcctaaggttgatgctgtattacaggcatttggtaagaagacccttatttcattgtcatgcaggaatctccaggcatttttatgatttcaaaataaagtgcagaatcaaaacagtttttaaatcattcagtctgatatcttttttactccaaattcctgaaaatcttaactttccaatttatgcaaagtgggtttaaatttgtgtgtgtgtgtgtgtgtgtgtgtgtgtgttttcctgaataacttcctagtctctgtttcatatccgcacataaaatcaaaggatacttcctcacacagaagccattatctttcaggtcactatgttggtataaaaatacaatctgtgtgagccaggcttactgatggctggttgtcattctactctatcccatcctgttgtcccttttcttctatcccaccccaggggagccttgtctgggcttctgttgcagtctgcgattgcctgcattagtcatttgtaaataaaatactagtcctcccatatgctcaaaataggtcaaatgtgattcctggtaatgggcaaataggaaagcaaaacttgttcttgattactctgaaggaattttggagggagctgccagtgcttgacaatccaatggtcatgaggctgatgatcttgttactaaaatgacttaaccatgatggatgcaaagcaggaaatggacctctggctcatttatcatttgtctgattctcttgggtctagttgtctcccaaactgtaatttagaacctagcagaagaggggaggttggaaagaaagtaaaacaaggttttaaaatattatagaattttatctctttagaaccagtatgacgtaatgttttagagcacttcctttggagtcagatgagatggagtcctccctccttccttccttacagatgctaccttgttaaaattacaaaaccgtcttaatttttagttttgttctcattaataacacatcacagttttttgtaagggtaattgagataaagcatgtaaagcacttagctcagtgcttggcatagagtaatcacttaataaatgccctccattattaacttgtacttaatctaagttatatgtgttgcaaaatgacatatttgaagatgtctcatcattttccttatctatatttacaggatttttctacttcttcagtggatcatcacagtttgagtttgaccccaatgccaggatggtgacacacatattaaagagtaacagctggttacattgctaggcgagatagggggaagacagatatgggtgtttttaataaatctaataattattcatctaatgtattatgagccaaaatggttaatttttcctgcatgttctgtgactgaagaagatgagccttgcagatatctgcatgtgtcatgaagaatgtttctggaattcttcacttgcttttgaattgcactgaacagaattaagaaatactcatgtgcaataggtgagagaatgtattttcatagatgtgttattacttcctcaataaaaagttttattttgggcctgttcctta

SEQ ID NO: 38 - DNA, 24479 bp, Homo sapiens
gtttatttattttttctttttttttttttggtagaaatgggcttttcgccatgttgcccaagctggtcttgcacttctgggctgaagcaatcctctcgccttggcctcccagagccttgggattacaggtgtgagtcactacagtgattgtgaatgcactgagctggcctggagaacacttaccaccttgtccacgtcacatgcaaaaggcccatggtggtggtgcttcctgcacacgagggcatgtagtgaatgcccttcccaggtggagactcctcagggttgggagcccagcaactgccttggccctgagtaagccaggagttgcactgtgacctgcaagtgcttgggagctgcacccctgggtgccaacagctgcaggtaccctggggtgggcagtgggcaacagctgtagagctgggagctgggcgtgaaaggactggggcaggactgggcttggactcagctcctccctgctcagcagccccttcgttgtgtcctctgctgtgcggaaggggttctgccctagtggtcagcaagcatccatggagcctgccgggcgggccctgtgtgcagcggcctccacacgtcagcaggggactgccgtccctgccagcgcacctgggccttgtcctgggcagcacagaccccttagccaccactcccaggtggggcggtcactcccagatcctccatccgtcccgcctgcagtgcagctgccttggatgctgattagggtggccctgaggggatccttctgtcccaagttacgggcctgcggggcccgtccacagtgctgtgcccctcaatttggagctggctctgctgcttcccagggcagcacctatggggagggcatcgtttataccttgactcaaagttccaggatctcagggacagcttaataggtggaagggggaagctgtgagattccagggagagtggagagattccagggagagtggagagattccagaaggatcccttacacccctccagcaccctcaagggcctgcggtcctgtgcccagacgccacgccctgccccagcagccctgcctggccagctctatggccccagccccacggggccggcacttcgtgcaacctcggggtagcctgggttctattttaggttgtcccttaggtgagggaccggggcagacagaaccagtctcaacatgctcgcagccacttccccgtacatcaggtgagtgaggacagactcctgggttgctgagattcggggatctggattctggcaggagctttgaccccaacaggtctggaccttactgggcatctacaggagctgggccgggcacaagagaggactccatctctcctgcctgacaggagaggactccacctgaccagccctctcaggctgggagtgcctcggggagcctgctgtgaggcagggggaggggtgcggagagaccgggcacagcttgccagttgactgcaccaggcccagagcaggtgctgaaaggtctggtcttttgtctgcaccctcccgtgtttgtgaggaaggggtggcagggggtctgcagtcttaagggccaagcagaaaagaagggccaaggcaggcacccaccaggcaggaagcaggtgtgccctgaggggaaggacaggccatcgcagggctgggttgcacccaagacttctgccaggaagagcactgaggagtcgggacacacaggtcctccccaggtcagccaccgacacttgggatgtgctgggcttgtttccacctctgcaaagcagggcccccttctgggccctcatatcaggcactctgacatggggtacagtcctggcaggtcatggggctggggccacagggagagcgggcaggtggcttagagccatcggggtgatgagtggcaagccccggcatgagggctgcagaggactgtcactgcccacgctggagccagggctccactcccctcagggcctgctttcacatctacgccgatcatccccaaggccgggttgctagcgggttgctgtttgtcctgacacccagaagcagatatggggtgaacatcttgagtggggtggggtgagttggaggatgatgaccagtgactcggagatcacttcctccgtatgtttcttctgcctttgcaggacctctgttaggataaactggagccttgtgaggtccctgccccattggagaagttggggagcacccagggtgacccagttggtttccagggacccttcccctgctcactggctgcttgtcctgggcctggcatgtcttgctcctgatgcagctcagctggcctcagagcaaacaatgagggccagaggccaccaggtgcatcctgggcaggaacaaagggccggaatcctggagctggggaggcccagctggccccgccgccgccgggcctgaggatctggagcctggatggaaggaagggtgggcgcccacagccttttcaaagcctgcctggggctgggcagggaaaccaacgcctggagccagaagctggggcctgccaggggcctccccgtgcccaccaaagggcagtggttgcaattggagagcttctgcccctcagccttgttgctcccttgggcctgggggtgggggaggcgggcagcccaggcacctgcacagggacctcccccagccccacagccttggtatctgaggacagcactcagctgaggtgggtacggggctggcaagggggcagcaaggccaagactgaggaggtggccttaaggcacgtggtgccgagaacacaggcccctccctggagaagacaagctggcttgtggggcaggcagtttggggacagccctgccaggtgccgttccccatccctgaactggacagcttggcctgtgccgtctctgggcaatggcagcgctggagacctgggccaaagcacctgacagatgacacaggaccgcggggctctctgcctctgaagggccagggaggagcccagtaggggaagggtgggggcctggcctgagccggcccatcacagcctccttggcactggctcctcatgggtggctgtggggactgtggagctggctctggggctggagccactccaggccctgcctgaccaccccctggcctcaggacacagttccaccggcgccactgctgaggaatggaggaactgccccttgagccctagaggtgaatgttaagggctttggcactgtgaccctgaggaccagctttggaacaaagccatcactccctgcgtgaggacgttgcggctgcaaccctcctgctgtgggactggggtgcacatggctagaccatgcatgggaaggtccacgcaggaaggttgcgggccccaggatgggaatggcagaggagtcattggggtccacactgggggacgagacagaccctcagaatcggctgagggctggtttctgcctcgtgagccccctgagcccctcaggaagactcaggacgctccgtgcatgtttgctgagtaagggcttgaatgaatctgggtccagcaggtgtgggcgggaggggtttgtccccactagaggagaggttttacctcgtggagagccccagaagcaaggatgggggggccaaggatggggccaagggagggccccatggccgtcagcatccctcacccctaccttgtggtttgacttaacctccaggagggggcagggcagacacaagatactcattttacaggtgaggatatgggtcctggaaggtctgcagggaagcccctgccgctggtcccagggcggtgtccccacctggagggggagctcctccactgaggaaagccagggccatgggagaaggcgagctcctttgaatagagggtcagcaaaggccaggatgacagagaggggggcaccagggccaggtctccttggaaagacctggggacagcgccccaagagtctcatgtgggtctcgcccttcggagtttaactcaagctgtctaggtccccacacatcccagggtttcctcctccaccttggacattagggaacacaaggaccaggagagccgggctagttgaatgggaacgggggcccaggcttcgatcccaggaataagccagggaggctgccagatgctcaaggctgcatctgggtaagcaatggtcactgccatgggccccatgcttctcctaacacactggccaggtgcctgtgtgcccatttcccacccaccctctcctccctgcagtgagtggtagctgctgtgatagaggtcatgcccccattctgccttcagccttagggtccagcctggccctgggcaagcccctccaccctgggcctctagccaggaccccactggtccccagaggttctagaatgcaaggattcccaaaagcctttggccaccaatgccccggctgtctgacatagcctgtcctgtcgtgaacagttgggattagtccacatccctccagatgcaagggtagaaggcgggtccccttggacagcttggagggctggacatgaagttgttcccagttggaagtctccagaaaataggcgagtggggcggggggatggggggggaattcccagcctcaggctctaaaattcccagttagtctgtggtgcagacaggactccctgcctccttgttcagggaagtaggggaggatcaaggccacactgggcaccaggagctggaagaacaagagggtctctggcccagagtctgggatggggagaggcagagggggcattggaaattggggacacatctttgaactgagataacagctgttgccaagaccagcacctgggccaggctaaggaagggcagggctaaaggtgggggagctaagggtcaggcagggccttgaacgccgtgttcaggaggctggcctttatccctcaggacctggggagccatggaaagatctgaggagcaggcattgggcacagctggacactggggaacgggtgacacaggggcatggatccagcccaactctgataaggaacagcagagttccacaggaccatagtggcagaggcagcagtgaggacttcttttttatttatttgtttgtttgagacagagtctagctctgtcccccaggctgcagtgcagtggcgtgatctcagctcactgcaacctccgcctcccgggttcaagcgattctcctgcctcagcctcccgagtagctgggactacaggcgcatgccaccacgcccggctaaattttgtacttttttagtagagacagggttttaccttgttagccaggatggtctcaatctcctgacctcgtggtccgcccacctccgcctcccaaagtgctgggattacaggcgtgagccaccgcgcccggccggcaatgggggcttcttaaaaaagagggaggctgggcccggtggttcacgcctgtaatcccagcactttgggaggccgaggcgggcggatcacgaggtcaggagttcgagaccagcctgaccaacatggtgaaacaccgtctctactaaaaaatacaaaagttagccgggcgtggtggcgggcgcctgtaatcccagctactcgggaggctgaggcaggagaatcgcttgaacccgggaggtggaggttgcagtgagccgagatcgcgccactgcactccagcctgggcgaaagaccaagagtccgtctcaaaaaaagaaaagagggagtgtgggggtggggcccggagcgctccaaggggcggggaaggggactcccaggcccgaggactcctggaagggaggtgagtgtggcgctgaggaagcggcgggacggatgcgagcccgggaggagcgcgctggggggccgcaggcgggggatgtggcgcggtccaggcccgtcgcggcctcgtcctgacagggacacctgcgggatcgtccttccaggatcgcctgcgggcctcgcgggccgatgcctcgggtccccctccggcctcggtttctccgcgcagcggggcggggcgggggcagcgcgggtctcaaagctgcctgcagggggcgcccgtgagcggcgcggccggagccggagacccagcggccgccgagacagcgggagccggcgtgcgagcggcaggtcagccggggtgctaggtctggcgtgcggggtcctgggtgccgggtccggggtgcggggtgccgggggtccggggctggtggccgggcggcgtggggccgtcgggggtgcggggccgggaggactgggaggctggggttctgctcccctcagggttcctttcccgccgccccgagaccagttccccggcgcggggtccgagtcctgccccgcggcggctgccggcactgcctgtgaagggcccaggcacagtcacgtcccaggcgcagttgcggcgccgcgtgcgggaccctccgagctgtcccaaactgcaccggaaggcgcgcaggggtaggcggggagggaaggcaagtgcggcggccggcgcggcgcggggtgcggagccgcaggtagcgggcggggagcgtccgtccgtcagtccgtccgtccgtccatgcgccgcagaccggccccgcgcgctcgcatgaaccttcgcgagctcctccagcagggatggaccgggggcgcagaggcgcttcctgaggggtggcgggccgggccccggggcgagggagattccccaggtggaggagccgggcggagaccggttccccgggaaggtgaggcgcgggcagagatacccgagcgcccgggacgcgccgagaaagggggaatcaggaacgctgggccgagcgctggcgtcttccgtggacagtggtggcgggaactgggtttgggggacccaggagacgacgggggacggatgggggtgggtgcgcgcctcggactggccccggccgtctgtctggctgcccggagcggaggtaggaatggcgggaatggtggcggctctcgagggatttggcgcaaggcggcccaagggcttgaggaggaggccgcgggccggcagagctgaggtccctgtgtcccgcactcagactttagttgccccgactgtaccatgggaggaagagggagacccagggctgggtcctaggctgggggagtcggggccctgcaaagacgcgcaggtgtttgtggcccttgttggagggtgagccgcaggtcaagccagccctccgtcgccatcctgaagcacctcctctcttgggctctgccacacacagggccttctcccctattgccaggtgctcaggccgcctccaccctgcctctgctgccggctccccctgggttccccggcggggcaccctgccgatactccatgacgcgccagggctgccccagggtgccccagccctggggaccatggtggagggttctgtggagcaccgcgggcctgggaagctgttgcggggtcggggcttcctcactggccctgctttggccgttcctggaggccttgggtggggctgggaaggccgggccctgtgggcagcaccccccccccccccgcccaacatcccggcagatccatggcaggggcgcctcacaggctggtccacggccacggtgtcagtccctccttgttctgcgcttgctttttggggtctcccagcctctccctagtcctagagtttctcaggcaaatcccagccactacccctccatccgtgtcccctgtttccccagtgctgagctggctgagctgtgagctttcctgctccttgcctcaggaagccaggggcagcccagtcacctctggccagaggcgggccttaggccaaggctgacctggctggtctgagagctgtgctgggcttcttcccatatcagtctgtgaattacagatccccaaatatgccctgcgtcgcgatggaggagggcaatcaatggcaatgactgcctcatgggcaacgcgatgtgctggagatttcagtgctctcgtctgggttctggtcttgcctcctcgacccactcgctgagcaggttgctgtcccggggaatctgatatctcatctgtagaacaaggatgatgatcttagcaatgcctaatgtggaaaggccttggcttgggagcaagtgggggaaggtttagggcagaccagagggccggtgaggggtgtgtgctggagcggggaacccgggagggagggtgttaggcttgagggtcaggggacaccacagggattgctgttggcagagggacatatgaatggtagttggcctgggagccagcatgtgacttgagagcatcacgtcctgcaaagtccaggtgaggcctgggcagtgcctgctgtgtgggaccacagcccctggtggctctcagctgtgtcctgacactccaaagaaggtcttagtaccctctcacagacctaatacccgagccacctaaccccaaatgagctagaactgccttcccaaccgtgtttgcggggtctgtcttgtctattgcagcgcaaacagagccctgagcacgcaggagagcagaggaaggacagacagaagatggatggatggatgaaggcgggaagcacaggctgaggggatttagggcatgtgtggtgggggtgctgtggagaggagactgcacaggcaggagctgagctggtgaatgggagggttctagctcccagaagggtctgggccattgacaggaggggcttggtcctaggaggtgggtggtccagaggttgcaaggagcagaggagcccagatggggaagggaatggagctggggtgcagagaggagcccccacacaactgcccacatcctgtgcagaacctggggctctgggtggtgggaagaggcagtttcatggcggaggaggcctgggcccctgcagcctggactccatggatctggccagggactggggaggatcaggtggagagaggagcagcagagcagctgcccctcgtcccagcacaggggatgatgggagcccagggaaggcaggaccctggcttcgggcattttctctgctagaatctctcgatacctctctcccttcaccttctcctccaagtctcacccagatgatgtttctgtgagttgccatggggattctctcaccaccccccgccaacaccccgcaggggaagcttgttccaggagtcactgggcaggggctgctgctgctcttctgtgcccactcctcggatgtgccgctgcagccctggtctctggcatcggccgtcacctggtggagaggctgccggagctggccaagcagagggaggccgatggtgccacttggtgtctcctctggcatctgggcaggagacttctccccagaggccccgggctggtctgcccgtgtcacaggaggactcgcctctggtccctcagtggcctctgcaaaccctgagccagcctgggggaggctgctcagtggggaagaagcagtggccaggctctgcttggtcaccctgccctcctgtcagcctccggggctgcctcgtcgcacctgcccagggacccaacagccggtcctcacccctcccatcctcattgcagccaccctggggcattgtgaggccctgcacccagcactgccccttcaagcctcccacagggtcccgcccaggactcctgggctctgtgtccgcggggccatctagaaacactcccttgtccccccttcagcggcatagtacctgttgcccgccatctgagggaggtgcaggtgccaatccttcacgtgacgtgacgtggctcaccacagcctgtgtacatgtgagcagccgcgtgcagaggggaagctctgcctgggcctcagggactgtgacatggagcaggagccgcccccagccaagctgctttcagcacagcgtgggcccccagcaccttggtgcggggtgcggcccctcggaggagggctgtcaggtgaagcctcgtgtgagggggtgagtggcccccaggcggggaggagggggtgctgtggccttcctggcccctagcctggacacatgggggtgtggggagcaggagctggggcccccagcactggccccggggctgcgatgtgggggctgctctgtgaggcaggctcagagccttagcctccagctgcagggagctgggtcttggccccatcttgcccacatcctgccaccaggagcagagagctgcagctgcacccgggctgtgggggagggatgccaggtgtatctctgggtcccgggcccagcctgcacccagcgcctgaagtaagggccaccgggcagccccggaggtcaggagggaagtggagcccgtgctgggtggctgcttaccactgggcagtgaggaaggcacctgcgctgatgagtttggaaggggtatggggatcctggggccctgggttctgggaggttcatgcccaggcccccctgggccatcccaaaagccagtcatagtggggcccacaacctgccgtgccctgccgagctcccgcaagccacttgttgatgcttctcagtccaccccatgcctctcaaccgtttcctcctagactaggtctcttcatggcgtttctgggagaattcctcagtactagcttcagatccccagtcgtctcttccactgtacgtgtgcctgaagctcaccacatcccttacttcagtccttctatttttcagtccctggattttgtattatttcttgttcatatccacctgtccttgtttcatttccgccagtcggttcagaagttctcattcttgtctacggatgccattcctttctttgcctctttggagattctaaaggtctctgaaatcattattagattactgtattaccttccttcctactggaatgaattcacctccatgttttttattctgttgcttacctttcttagccttcatatacctcttgcgctttgaaattgatttgcgactcctcttagctgagccaatgttgtggagacagggagtggcctgcagtgcctgaaactgcagggcagcagccgcctcccaggaatgtcctgggtcctttcctcctttgaggtcccctgccatatgctcagatggggccaggcacagcaacgggggcacacctccctttggcccagcagttggggtgctgccaggcctggtggaggtacttggtaaacatttgttatggaaaagcagcaggagggttctaaggctgggattctggagcccaggaacaggccaggcatggctggagcgggtccgagtccgtgcactgtgtcctgtatgttgctcttagccgcactcaggagcagatgtgcaggtcactgcctagaagctggtgggcacctccgtgcagcaggctctggggggtatagccaccatctgggcatgtgtacagagggccttgctagtgcgacatatgaggaaccagaagatgtgtgggttttgattaaatggagttttaattaaagtggccaggttgggggaggtgaggaggaaggcaggaagcagcagcagttttgagtctgaccgcgtggaatcctataaggtggttctttcaagaggcattatgcacattccgcagcatgtgtcccctgtctgtatggggcagcatctgccctctgatctgtccccaacaaggggtaatcacagagaagtattacattattaatatttaatttcccctcctggttagcaacagatgactcaaggagtaattagatgcacagagccaacagagagggataggaaattgccagatcctggccccgccccctccccggggcctctgaccttcctgtcactctgggaggcttctgagggaggggagctggaggcccaggagccttcctgctgctgtgctctctgtgcgcacggccgcagccctacaccaccttccagtgctcttggtgaggctgagagaggtcgcttcgtgcctttgggcctcagtttcctcatctgtaaaatgggcttcctgggaccagcaagatcacagatgacagtcatttcccaagctcctaagcaggctgcacaagctgtgtctgagggtccagtgcagtgcctggcctctaggcaggtgccccctgggacgcgtaaggtttggcagctcagcagtgactggcatcgtggccagctgactctgtgttgctccccagttacggtccacgacacattagtagcttgaaactgggcacaaggggagaatttacaccacagaaatcaggcaaagcctgtaagtcagggtgcccccggccaggagctgatttgccagcctacggctgggtagctcccaacctttccccaatgaatgcactcctcttcccctgtctgccccaaaggtgcctctgactccactgatctgctttgctcagggccgagaaaggcacagctgagagtggattctggcttggcaggggcccaggttgcctgtgggtccgggcaagcctcacccgggatgtgctggcagcagctgggagagcctgcaggagtgcttaaggaggggctgagggagaggacgggcagcgaggtggcctgtgtggaccctgctggcaggagccgtgggtgtctttagccccgtgtgaggccggcctgggcagaggggtctgttgctgtcactgaggctggtgggcagcaggaaggtggcttcagtatagtcaagaaggttatcggtatctagtgctgtttagcatggggacccacagcacagaaggtggggagaccctgagaacgggggtacacaggcaggtacccagggctgccagggaagccttgccaaacagaggccctggtcaggcttctcccaaactgggcatcccagctggcatggcaccagtccagcccgtgaggcaggcgccgatgatttgaccccaccagcagggctctgggtgatgggactggggagtcctccttcactttggcagacgtgttatgttccaccttgtttgcccccagcaaggcccttgaatctggagcgtggtctggggctgcatcagccttctagcctgggatggtcagattggcagaaggctgtggcatccttcaatgcagatgccctagagagggccgtggtgggaggcaggatccctgggtagaggcggctcctcagtggcccactgggcctcactggacagtcgcctgttgctgctgctggtggtgctgggcctgggagtccaccttggagccacaggccaggcacctgggtgggaggcagcccggggccagcaccagctccacttgtacctgttgggcaggggctatcgtgagtcaggtgggccctggtgagtactgctcagggagagaggccaagagcatcagggataactgtgttccttgagtgtggccagggatggtgccaggagagctggtctggtgcatccctgccaacgacacactttgtgaatggctgcctggcaagtgctccatggaaagcaggggcttgggaggactcggccctctccagctgctgcaggccctccgttgctgcagggtttctggctctgctctctccttcctcctcctgcttctgtgtcaatgctccattcccaggctcctagtaggggcaaaagggcctgctgggtgcaggagaacctccagtcccaggtatggctgcagcccgtgccaatcctgttccagccacttgaggtgccgacagcattggagttggagggaaagttggggtctgtgtgtttgagctctgtcacatggacaatggggtagaggggagcctggccctttgaacagggctcaggaccaggagtgacttcctctccaggttgccagtcctgctccatccctcatgtcctggaagagagagagagacgaggtggctgcccgagtccacgtgaaaggcagcctctgacctcttgtccccaggcaggtggtggcggctggcaacacactcatagggccccatgagggttcaggattggagggggtagatttgggggcctcttagctctcaaagaggggcaatttaacgggcagaggtccatttggatccagaccattcacaggctcgaaggggacactgggagttggggctgggctcaggcctgctggggaaccaaaacttctgcttctgaggggtgtcagtaattccattttgactctgggggagccattttaaatctgtttatttccttctcatagaatcatgggtgagagctggcatggcccctagaggtcatttggggtccagctgcctcaccgtatcaatgaggaaactgaggcccagaaaagaaaagcatttttgcccagagtccctcagtgagtcctggttccgtacctgctttctgccagggaccaaactcccgttagtcattcctggtgtcagccaggcagaggagcaggtgggggagagggcgtgggaggagggaggtgaggcagctccctccgagtggaagctcacagtcagctgcagcgccgcccctgccctgactgcagctgactggcaggggcacctggaggcagcgggttcgggcgcagtatgagagggcttaccctctgcggcagtgggagacaggaccaggcagctccccacatccttccacatccgagctccaggggtctctggcttgtcctttcacagggcggctggtgtcccttaggtgggtgctggtagttcctgggagagttgacgggatggagcaggccaggggggctgagaagttggcctggcgagagaaggtgggtgggactgggagagcctgggcagggaggggcctttctgggagggagtgtcatggggctggccgagatccaggacccaggagactggccaagctgccacaggaggcctgagaggctgagcatgggggggccaacactgacagactttaacaagtttctggctcccccaggaaaaaaacagaccacatctgatccttggccctgagtccagagtgggaggcaccgtgacaacaatgcgcagagcagggaatgcagggagccatggatagtgctggggtgagctggagtcctggcaggggcccagctagggcagtactcattctgcagagcctgggagaaggggctgcctccttgggaggggtttgtgtgggagtctcagcgggaattctattggaccaggggaaccagccttgctcagtgacttctctgggtgtcctcctctaaagtgagggtcaaattcccacctctctcgcctcctggctatgaccacagcagaccaggcagggcatggggctaggcggggtcaggggccatcctcaggctgacacctggcctgtgggtagggtgggatctgaaactatagggtcttcagggggccaagtgtggggtaaggggtggcactttccgcagggctcgccctctgcagatggttcagcttctcatcggctgtccctttgcaggtgcctcaggaaccctgaagctgggctgagccatgatgctgctgccagaacccctgcagagggcctggtttcaggagactcagagtcctctgtgaaaaagcccttggagagcgccccagcagggctgcacttggctcctgtgaggaaggggctcaggggtctgggcccctccgcctgggccgggctgggagccaggcgggcggctgggctgcagcaatggaccgtgagctggcccagcccgcgtccgtgctgagcctgcctgtcgtctgtggccatgcccatcatgggctcctcggtgtacatcacggtggagctggccattgctgtgctggccatcctgggcaatgtgctggtgtgctgggccgtgtggctcaacagcaacctgcagaacgtcaccaactactttgtggtgtcactggcggcggccgacatcgcagtgggtgtgctcgccatcccctttgccatcaccatcagcaccgggttctgcgctgcctgccacggctgcctcttcattgcctgcttcgtcctggtcctcacgcagagctccatcttcagtctcctggccatcgccattgaccgctacattgccatccgcatcccgctccggtgagcagggccggggttacatctgtgcaaaggctgttggtgcccaggctttggtctgtgcccggagccagggtgagcctgggatcagggcctggtctgcagtgtcagcatggtgagctggcgacggggccccaggctcagcaggggctccccagggccagcacgtggccagcagtcatgccgaactgactgacccctatgggcgcagggcagcctggccctcccaggcggcctgggttcccctaggctgcctgaggccaactgtgctctgctttttggcagatgagtgtggccagggtctggcattgggcttagcagggagctgtggtcccagtgacccacgtgctgccagcgggtgtgtctgggccattcctcacacacaagcaaaacttcccggatgatgctggggtggagtggggagccaggggaaaccataggacctcagagttaggagccgcccgccacctgccttcccccagatcctctgggccagccttgcagtgtgcacattaggaaaatgacccagagaggggaagtgacttggttgaatgccacagtgagtcacttggacctatatgcaaattctgttgctcctcaagtcaccaaggactcatcgtcttagaggcagccagtgtgctcaggggctggctgttggaggggatttttatggtgaatcttttgtgaagtgacttcagccaagtaattgtgcaaatgaagattttcccagaggctgaattactcggcatggattccacctacccaggccatagatgaggctagaaagtgcatccctcccttggggacgtcagaggccttctgccccacctcctggcccctctgccacagagctgggttccacagcctgggtggttgtgggccctgaggccatgtatgaggcttgaggtggtgcctcttgagagtcagggagcagggtgcaccatctctgcggtgaattatctgaaactggtgggtgcctatctaaagaggaagccacagcaggttgagggtgccccagcaggaaggaggacccagctagatgagcaaatggaaatttagagcgtcaaagccaaggggcccttagaggtcatttcctctcatcttcgggatggaaaatgagcctcagagaagacagccagctgtttccgggccacacaacgagttggtagtggagctggggcgagtcctggaaagaaatgtggcctgatccccactgtgacttcagtcactggggagcggtcatgagcagcctgtctcgcagagcctgcaccaggtggctgtccctgtcacctgggctctaagtgggagcaggagctgcactgggctgctccagggaaggggaggaatctggacctcacactgccctgtcagatgctctctatcccaggagagtctagaaccctcggcaaaggagaaggggaccctggccagccctgagaggggtggaattagggattgtcggactccaagtgcagtctctggtgagcctccatccattgctctgcgacgggcagagcagagtttaggttcgtccagtggcagctcagaacacggaggcccaggaggggccctgtctgcaggtgcccaggtgggccagagaacaaagcactggaggggacttcagggaaccaagctgagtctgcacactgatgggatgctctatggggaagcagaggccaagctctcacttttttctctgattcaaagggtatgatcagggctgccgttctcaatttaaaggagctcgactttttttctcttttgtctctccctttccttctctgttttctgagagttgagagaatgactccctatgtagtaggacaggatgtgctgtgtggctatggaaagttagctgcctctctctgggcccatttcctcatccataaaataggacaagtctctctgcccctctgagctcacaaaggtgttctgaaggtccagtgagtggatggggtgacagggaccctgaggagggttggaggcgtggggagggtggggattcagatctttgggttcagagccatggacctgccccctatcctctacccatctcatcccaacttccttggagctggaccttagttccacccagaccttgagccatttgactctgctccatgaggctctgcaaggcttaggctggtctcttctgcagggggccctggagaggatgacgacgatgatgttcatcctcccttgagggcagagagctttgcagttgccaaaggatgtcagctcagcatctcctgtcatcctcttggcctgcattgtggccaggcggatgttctgaccctcctgttactcacaaactcatggggaggccagagcagggaaggacatacgagtgtctcctgatgtggatggactccagggcccttcaggctgttcctggcccgcaggtcccttcgctttcctgttcctcagggcccctgggcctctgggcatgtggaggtgtccatgtgggctcccgagagcaagcggggtatgaaaggaacttggtgacactcctggccggcgctggagtcacagcctgcctcaggatcctccctcctcctttctcagctgggaatccagcctcctctacgtgccgtttcctgctccactcagaaaggtccattcggctagccctgggtctagcctcaggcctgccccactctccattaactttttttttaaaaaaaagaactcagttttggaaaaatctgttattttccaagttcagggaacctgttgggctagcacagggcctagtcgaggaactctgtgagaaagacttcaggccagaggcagagatgtagctctctgtgttcccagaggatagggaattcagggtgagagacacaggcttctttttccagttcccaggggatttttgcctcactgtcccctccctggctctcacagcagcccttggtggatgttctcgctggtttgaggaacaggccaaggtgcaggtggcagctggtggtgaggcccgaagtcctaacacttctaagagggcaggattgggagagagggctccctggaggaggtgtcacccagtgggtcttgcaggacgggcaggcagggtctcactggcatgagtgtgggggcaggtgtgtcaggaggggggcaaagcctgggacaagaccctgaggaaggaatgagcatgtgagcactgggtagggaagggtggcctggctgcctagtgacagagagagatgaacagagtgggcaggaaaggtggaggccaagtcaggcctgttcgtaccaggggaaggaatggaggtttccctgtgggtccatggctcttcaattcttggatcaatgactcctttggacaacttaggaaggctccacctactcctcaggttgggacatgtgcacataaagccccagctggaatcatggggcatattcttggaccatagggtgagcccccagtgtgggtaatggagatccccagaaaggggcagcctgcaagccgggggacacagagctgcagagggcacctccacaaagggtgggcagcagctctgggacccacattctctgacatgcctgggcaccccagagtggtggtgtgtcacgctagacagccttggcatcccttccagctggatggtcaatgtttggggtctaagacggcaagatgtgagtgtgttggtcacagatgcagcccaggatatgctgctgggcctggctgaggctcagctgtgattccatttgggccctgatgctgtccccaccccgtgggcaccagggtccagggctctcagcctatggagatttcttttgaataaacttagtctatttgcaatttaagaaaaaaaaaagtcatgttttgcccactctaaaacattaaaaaggaacaaaagagtatagtatagtagaaagttgtcctccataccccctgtcccccaccctcagttccctgcctgcaaggccatgttaagaatccttccagagatattctttgcatatataagcaagtgctattaatgtatgttttgtttctgtccccacacgggactttctttgcagagtacggtggaagactccccttgtgggttcccttttctgtacaagtcaacaattggacagaccagggatttccatactgtgttcccagaagccttcgggttggctctggtgtccccaccaattcactgattcaataaacatttaataagccccttcccttccccagcagcttcacctctgtgactgcctgggaatgtgggcgacaaggtttgctgctgagaacagtttgaaaaccagcaaagcaggtggcccagggcccaggcagctctgcaacacccctgtggctgcttggctctgctctgttgcctcaaatgacaggaaactcactattgcctgaggcaggccatctctcctgtgaacagctcagctgaaaaactcttaacctaccctgagttacaatctgcctccctataatttccacccactgattctccattctgcccttagagggcagagtgctgacaggtccacgacttggtcccattttacaaatgaagaaactgaggctcagagagacaaagttttaaaacattcctgttaacagggccagaacccaggaagggatatgcttttctcaggaataatgtcaaaattaatatagcttcccagtcaatgaggactatataaattactatttgcaaagcactaagaacagtgtccggcacagagtcagtgctatgtaatgtagatgtgagaatgagagagcctgagattttatgtttgcgagtcccacaggaggcagggcaatgccaactccctgttgcttggaagcaatgggcaagtctatgaccctcctgttgaggccctgttacaggtaaccaagcccccacggaatggagctgaggagctcctgagaatgggcttgtccggttactgtttggattcagaactgacctaagagattcagaacagacagactcgccttggcctgagttgcctctgggctcttggaatgtccacagcaagtccattcctctccttgggcctcaatttacccacctgtaaaacaagaggattggaccacataagagatcggaagccaccagggtttctctttttctcttttatttgaattagttgacaaaacttaaatcttgggagattttacccagaaaatcatctccccagccccacctgagatctggtaatagcaggcgtacgttttgcatggcgctgaagaccaggtaaacgccccaccagctgcctcctgtgtgtgctacctataggcgcctgtttgctacccgtgaatgagatggtttctgtggatgttcccagctccgcagttaagtagagcacatccttccccttgcacctttttttttttttttttttttttttttttggagactgagtcttgctctgtctcccaggctggagtgcagtggcgcgatcttggctcactgcaagctctgcctcctgggttcacaccattctcctgcctgtctcccaagtagctgggattacaggcccccgccaccacggccggctagttttttttatttttagtagagacaaggtttctccatctcctgacctcgtgatccgcctgcctcggcctcccaaagtgctgggattacaggtgtgagccactgcgcccggcctccttgcaccttctgagtgtccctgtctcggagctggcaatgcagagatggatgtaggaaagccctgcccccgaggggcccagatgtggtggggatctgctgcacttcggtaggaaacttctttgagatctctatcctggacttgaaggatgggtagggtttctgccaggtagaggggagtgtagtctggtcttgccagaatcaaaactgttaaacagaagtcatccctcagtgatcatcaaggttgccttcctaaattagggagactttttttttttattgtccattctttcatgaaatctaggccacctttcctacagggctgaggtctgcttactggctggcagatccagccatttcccgagtatgagactgggagtcggtaggcttggatttctgtctggctctcactcaggaagactgagtgatttcgggcagattactgtccccctggacctcagtatttccttgcaaatgttaagatggccatgtaaatgttaacaagtaattctctcatttctctccagagggctgtgggtgggtttggaggggagaaatggcatctcctttggcctgggacctcctcccctcttttaccctccatgctgcctctcctcaagggcttctggagtccccaagtcaaatggcaaatggggaagagaagacagggtatggagtacaagaggcctagatcctctataggtctgatctggctggtgctgcccctagccagtaaagccaccctccagaccccttcaagcctgttgtagccttaaccaagatcaaccaacatggaggtgactgatcttggttaaggctgcgaccaacatggaggtaattgatcttggttaaggctacgacacgtttccctttagagaaaaatcatgttttccccctcaaaaaatcatgcgttaatttcctccaaccaaactaagtcccaggactactccgaaaactactcaatgaccatctgggcatttgtacatgggtttccatttcttggatgcctgctctcctgttacctcccagaagcctgtgaaaaaggcaaggcatattacttccacttaacggaagaggatgctggggcgaggtggcaggaaatgactggtccaagaccttacagtcaggaaatgtggaaacgggtgctgctctggggttctgaactcttggccctgcttaaccctggcttctcagatctctgatgctggtctcttctccccaggtacaatggcttggtgaccggcacgagggctaagggcatcattgccatctgctgggtgctgtcgtttgccatcggcctgactcccatgctaggttggaacaactgcggtcagccaaaggagggcaagaaccactcccagggctgcggggagggccaagtggcctgtctctttgaggatgtggtccccatgaactacatggtgtacttcaacttctttgcctgtgtgctggtgcccctgctgctcatgctgggtgtctatttgcggatcttcctggcggcgcgacgacagctgaagcagatggagagccagcctctgccgggggagcgggcacggtccacactgcagaaggaggtccatgctgccaagtcactggccatcattgtggggctctttgccctctgctggctgcccctacacatcatcaactgcttcactttcttctgccccgactgcagccacgcccctctctggctcatgtacctggccatcgtcctctcccacaccaattcggttgtgaatcccttcatctacgcctaccgtatccgcgagttccgccagaccttccgcaagatcattcgcagccacgtcctgaggcagcaagaacctttcaaggcagctggcaccagtgcccgggtcttggcagctcatggcagtgacggagagcaggtcagcctccgtctcaacggccacccgccaggagtgtgggccaacggcagtgctccccaccctgagcggaggcccaatggctatgccctggggctggtgagtggagggagtgcccaagagtcccaggggaacacgggcctcccagacgtggagctccttagccatgagctcaagggagtgtgcccagagccccctggcctagatgaccccctggcccaggatggagcaggagtgtcctgatgattcatggagtttgccccttcctaagggaaggagatctttatctttctggttggcttgaccagtcacgttgggagaagagagagagtgccaggagaccctgagggcagccggttcctactttggactgagagaagggagccccaggctggagcagcatgaggcccagcaagaagggcttgggttctgaggaagcagatgtttcatgctgtgaggccttgcaccaggtgggggccacagcaccagcagcatctttgctgggcagggcccagccctccactgcagaagcatctggaagcaccaccttgtctccacagagcagcttgggcacagcagactggcctggccctgagactggggagtggctccaacagcctcctgccacccacacaccactctccctagactctcctagggttcaggagctgctgggcccagaggtgacatttgacttttttccaggaaaaatgtaagtgtgaggaaaccctttttattttattacctttcactctctggctgctgggtctgccgtcggtcctgctgctaacctggcaccagagcctctgcccggggagcctcaggcagtcctctcctgctgtcacagctgccatccacttctcagtcccagggccatctcttggagtgacaaagctgggatcaaggacagggagttgtaacagagcagtgccagagcatgggcccaggtcccaggggagaggttggggctggcaggccactggcatgtgctgagtagcgcagagctacccagtgagaggccttgtctaactgcctttccttctaaagggaatgtttttttctgagataaaataaaaacgagccacatcgtgttttaagcttgtccaaatga

SEQ ID NO: 39 - DNA, 2040 bp, Homo sapiens
agactcagctcctggtgaagctcccagccatcagccatgagggtcttgtatctcctcttctcgttcctcttcatattcctgatgcctcttccaggtgagatgggccagggaaataggagggttggccaaatggaagaatggcgtagaagttctctgtctcctctcattcccctccacctatctctccctcatccctctctctccttcctctctctgtgtgtcccctccatccttttctcctgcttctctctcttcttccctctctctctttttttctgtctttctttttcctctctccctagagcatgtctttctttctttctctttcctttcttctacccacacttttagactgagtagactgaatgccctatttaattgaaccaagcattgcttccttcaatagaaaaggagtttgagaacccaatggacaactcactcgttcttctaagccaatatgaaggagcccagtagtttgtaaatatcatctcttcactgctttccatgctacaactgctgagactatggttgaaacctgttaggtgactttttaaataaaaggcagaaattttgattttatctaaagaaagtagtatagaatgtcattttctaaatttttatatttaaagagtagatactgcaacctagagaattccagataatcttaaggcccagcctatactgtgagaactactgcagcagacactctgcccccaggacttttctgatcagaggccctgagaacagtccctgccactaggccactgcaggttcacaggacagggacagcccattgaaaccaacttttaaacctggatgcctaaccttcattttctccttgatattatgaaaataaaataaaaaccatgaaaggataaaagagggagagtggaagggaaggatggagaaagggaaaaagaaaatttgagagtaaatcctaaaacaattaatctaatagatatcatcttgtgaaatcctcattttaccaatcttatttatgagtcctgggttttgtgagaacaatggggttctgagaggcaccagagacctcatattttccaaaacctagaacagtataatgaaggaaggcggggaggcagggaggcagggaggcaggctggtgggagggggagggagggagggagggaaggagggaaggagggagggagggagggaaggagggaaggagggagggagggagggaaacaaaaagaagaatgaggttgaaaccaggacttagatattagaaacaagccattacaaaatttatttctatggttaattgtggttttcaactgtaagttacttggtgttaatttcctattaaacaatttcagtaagttgcatcttttttatcccatctcagatcaaatacttaacagactaaatgatttgaaaaagcaaaagtttactggcttgtgtgtgttaaaatggaggtatggtggctttgatattatcttcttgtggtggagctgaattcacaagagatcgttgctgagctcctgccagaccccacctggaggccccagtcactcaggagagatcagggtctttcacaatcaggttctacaaaaataaacatcccccaaaccacagcagtgccagtttccatgtcagaaacttagatccaaatgactgactcgcgtctcattatcatgatggaaaagcccaggcttgagaaagaagcccgctgcggatttactcaaggcgatactgacacagggtttgtgtttttccaacatgagttttgagttcttacacgctgtttgctctttttgtgtgttttttccctgttaggtgtttttggtggtataggcgatcctgttacctgccttaagagtggagccatatgtcatccagtcttttgccctagaaggtataaacaaattggcacctgtggtctccctggaacaaaatgctgcaaaaagccatgaggaggccaagaagctgctgtggctgatgcggattcagaaagggctccctcatcagagacgtgcgacatgtaaaccaaattaaactatggtgtccaaagatacgcaa

SEQ ID NO: 40 - DNA, 2043 bp, Homo sapiens
cctgcttgaagcctaactgtccaccagaaaggactgctctttgggtgagttgaacttcttccattatagaaagaattgaaggctgagaaactcaggtaagcacttttgttgtgggtatacttttaccttcttggtctcctcatctcccaggtggtaacaaacagaaatgactaaagcctatatgtgtgtgtagtggaaaggagcagagggaactgaatacagagaggatcctgaatacacgatgctgaatagagagaggggactcctgggggtctttggggatggggaaggaattaaaaaagttggagggcactgggtttactgagagcagcgggatggatatagaagaggactgaggtttggagcagaataagactaagatatttaggcaagagatatttagataaaaacttggggaaatatttgagaatgggaaaggactaagagaacctaaggagagagttagggatcttgagatgaagaggcctgggaatggttcaggaggatactgaattaaggtgaggtccaggaacagtttagatgtccagggtcccagaactgttcaagagatctaagttgaatgctaggttctgattccctcttcctcttccaccctctgcctctttagcctctatcatgtggaacagctctgacgccaacttctcctgctaccatgagtctgtgctgggctatcgttatgttgcagttagctggggggtggtggtggctgtgacaggcaccgtgggcaatgtgctcaccctactggccttggccatccagcccaagctccgtacccgattcaacctgctcatagccaacctcacactggctgatctcctctactgcacgctccttcagcccttctctgtggacacctacctccacctgcactggcgcaccggtgccaccttctgcagggtatttgggctcctcctttttgcctccaattctgtctccatcctgaccctctgcctcatcgcactgggacgctacctcctcattgcccaccctaagctttttccccaagttttcagtgccaaggggatagtgctggcactggtgagcacctgggttgtgggcgtggccagctttgctcccctctggcctatttatatcctggtacctgtagtctgcacctgcagctttgaccgcatccgaggccggccttacaccaccatcctcatgggcatctactttgtgcttgggctcagcagtgttggcatcttctattgcctcatccaccgccaggtcaaacgagcagcacaggcactggaccaatacaagttgcgacaggcaagcatccactccaaccatgtggccaggactgatgaggccatgcctggtcgtttccaggagctggacagcaggttagcatcaggaggacccagtgaggggatttcatctgagccagtcagtgctgccaccacccagaccctggaaggggactcatcagaagtgggagaccagatcaacagcaagagagctaagcagatggcagagaaaagccctccagaagcatctgccaaagcccagccaattaaaggagccagaagagctccggattcttcatcggaatttgggaaggtgactcgaatgtgttttgctgtgttcctctgctttgccctgagctacatccccttcttgctgctcaacattctggatgccagagtccaggctccccgggtggtccacatgcttgctgccaacctcacctggctcaatggttgcatcaaccctgtgctctatgcagccatgaaccgccaattccgccaagcatatggctccattttaaaaagagggccccggagtttccataggctccattagaactgtgaccctagtcaccagaattcaggactgtctcctccaggaccaaagtggccaggtaataggagaataggtgaaataacacatgtgggcattttcacaacaatctctccccagcctcccaaatcaagtctctccatcacttgatcaatgtttcagccctagactgcccaaggagtattattaattattaataaatgaattctgtgcttttaa

SEQ ID NO: 41 - DNA, 17269 bp, Homo sapiens
catcatttctgagtgtgtctgtgtggtgttccagaagagattagcatcagaagactaaagaagatctgccctcaccaatgcaggcaggcatcatccaattcactgaggtcccaaatagaacaaaaaggctgaggaagggtgactttgctgtctgcgtttgagctgggacatccatcttctcctgccctctgacatccacgcttccgattcttgagccttcagactcagacagggacttgtaccatcacctacccttcttgaccccttctcaggtctgtgaacttggaccaggactgacaactttggctgccctggttctcaggccttcagaccaaatcacaccactggctttcctggttctccagcttgcagatggcaggacttcttggcttccgtaattgtgggagccaattcccctaataaatatctcggtatttatatctatatcaacattggtatccaatctatatctatagagagaaatagcctactgtttctgtttttctggataactgactaatacattcattttatcatcaagataaatatttacaatgtgggatctgagaaggaggtggatttggctgcttcgggacctgctttcctgtcctgcctaatctctcacctcctcatttttgcttatattaacattagcttggactggaaaattctgctcttctagtcctgcaagctccagatcacaggattcttaattagcttggttttcaggcagcaagcagaaagtacatttctttaaaaaactactttttttccccttctctgctatcagaagaatcagtttcaaagtaagttaatttctttcttagtgggccttactaagactgatgcaagaaatagtctccaataccctgaattttcgtttttgataaaactttggctcgaagatggacttagaatatataacaggccatgggggtaaccggcaattttggtaactagaggtatccccactgactttgaccttagctactgccttcagccagttccacgtttggggacccatacttacaacattgcagtctatgttagttagggatggtttaagtcacagtgtcagaaaaataactcaatctggcttaaatgataaagggaacttattagttcacataactgaagcttcaagaaatagaattagtttcaggcaaaacttgattcagtggtccttgtttcgctatggactatacatgtctttctgaatttctgatctccctgcatttgagagcttcatcctagaaagaagttactatattcatcctagttactctattggcagaatagcttccagaaacttccagagcaaattgggaagacaatgtctgtatcctcgtattttgagccaagagcctgagttccacttttattggtctggctggcttggattaagagcccatctcttaacccaggggccagcaaactatggccattgggcccaatttgacctactacctgtttttgtatggcctgcgagctaagatgtttttacattttaagtcattgaaaacatccaaaagaagattattttgagaaatatgaaaattgtatgaaattggagttttagtgtccataaaaaagttttattggaatgcagttgggtttatttgtttctgtattgtttacagcccacagtctagcaaggactccttacctggaatgaatcatattttcatacgacaaagcagagctgagtagttgtgaaagacactgtatgacccacaaaacctgaagtagtttccatttggtcctttacagagcaagtttgccaacctgtatcttaattcatctttgtggccagagaagtggatttactgatttgtttcagctgatcaatgtctataacaagcaatgttgatgggctgaaaaccacacagactaccagaggggttgcttttccgaagaatcatgtaaggataaaagagaaagaaagagagaaagaccttggaacccaactagtatctaccaaatgtatgtaactttctcatattaattctgtctttatatgtgaagatgaccaatcccctgcctgtgattacatcacatcaagcatgttcttcccaaattgggggttcaattcagactctcctgttatatgccagttgtcttagggattttctcactttattcaacactatactcaatttttacattaataatgcagtaataatatacccctttgccattctgtattttcctgtataataataattattattgttattattattattttttgagacagtttttgttcttgtcgcccaggctggagtgcaatggcatgatcgcagctcactgccacctctgcctcctgggttcaagtgattcttgtgcctcagcctcctgagtagctgggattacaggcacgcaccaccacgcccagctaatttttgtatttttagtagagatggggtttcaccatgttggccaggctggtctcgaactcctgatctcaggtgatctgcccgccttggcctcccaaagtgctgggattacaggcgtgagccactgtgcctggtctttcctgaattattttaccggttttgtaaaaagattttgatcgggatataccctgttgccccacaaatgatggctagttcccaaatctgagactaagttttcattatagactttatattctaaactaagtcactaacaactggggccagacaatccttccagggcattgtagacataggaaaaggaaagaaagtggccagcctagtgggttccacctttgtgaaggagaggtctttacttctaactgctcttgaagcccagtgaaggggtctccagagggtaacttgtacaaactggaagtacctgcaaacaaggcaactcattttccagttggatgtcagcttacatggtgaacctcatgatttgcctgagccaaaatgagcaggggagaagaaaacagaagataggaaccaaagcagggaaaaggattgctggaggctgctctcccaccacatggaatgagctttccattggccgagtgatcctgtggaagggagctgggctcgagccatcctcccagtgacactccgcaaaggttgggggaatcacatgtcccattttgtctgggaaatgacccagtttatgccagttgtgccagcatagttattaatagtaacccctttgagtcttaaagtgctcatcctaccaataggagatccactgcttagcttacaaggatcttaacagcagtagctgatggggtggtctcagggccgctgtctacaaaggcccctggatgtgtgggcaagagggtgctgaaagccagtctgcccatcacctgtaaggtcttgcactcacacagggctaggtgtgctccatggtgcttttttgtaacatgctcaatggtgtcttccaggctagcaaaggcccagggtatgctgccagtggtgtgagcagaagagagaggtgaaagatgttgggcaagggtgggatctctcacctaagaaactatgcagagagaggaccctcaggaatgcccatctatccgagggaaatatacatgcattgcccataacttcaatatttttttaaaagatgcagggataacctagcagtgggggcagggactacatctgtaggcagttaaaagaattctttcccctctctcttttaaacatttaaattaaaaaaaattcttttagagacagggtcttgctctgtcacccaggctggagtacagtggtgtgatcacagctcactgcagactagaacttctgggctcaagcgatcctcctgcctcagcctcctgagtagctaggactatagctgcacactacaatgcctgctaattaaattttttttttttttgtagagacaggatctcactgtgttgcccaggctggtcgccaactcctggcctcaagtgttcctctggccctggcctcccaaagcactgggattacaggtacaaaccaccacaaccagcaaaattttctctttatattaccccacacagacaacccctctttccaacatgccagaggagttaaaaagagaaggagagagggtatctcagaaccaaactaaagcttcatcacactccaactaccagagcctgttttgctctggtgaagggcgaggagaaaggaagaagtagaaatgttagttaagtcaaatttaagattagggttctaaactgaaggaattttaataactggatgtgaccaaaacgtgataggatctccccaagatgttaaggtggagctgatgattggagaacagttaagcattttatgtttatagtctatatataagtaaggatagaataggttgtacctagataacaaacaaactcccagtggtctaacaaggtaaaagttttccactcatacaaaatctgatgtgggctagatcactggatctcacaatttagttgcatcagaatccactggtgggcttgtctaaacacagattcctgggttccacctgagactctgattctacaggtcttggtaagactcaagattctgcctttctaatgaggtttcaggtgatcctgatgctgctgacccatgaactacactctgagcagtattgatcctagagcagctctcctccaggtggtgactcaggaattcaggctgcttccatcctgtagctgtagattctggaatgagaaagaagacagaaaaggcatactgcttttaactgtcttggtccagaagtgacatgcttcacttaatcttacaattcattggccaaaattagccacaagagcccaatgcaaatgccatgaaggggaacatgtggactatttagtgaaccctactttgtctgccacttactcttaaaaaagaggttaaccaaggaaagagacctagccaatgtgaacttgcagtctattagaatcttttgcttttcctttcccccgattataataggctgtcagtttagtattcatctaatatatgaaggatttatgcaatattcatgttgttgagatgtgaaataaatcctagatctatttgaaatattttaaagttcatgggccaatggtgccagtcatcagatgttgagaggccttaggggaagaaagaatgagactctatggcttcatcaaggcagagatggctactatcatgattccggataatgcccccacacttgccctagctggtttgctatgacgggctagaggaggaatatctcaaaattggaagggaatataaaatgttgcatgagagaagctatttatgcaggtgtgtttgtgtgtgtgtgtgtgtgtgtgtgtgtgtagagagagagagagagtcaaaatgtactctttgggtctagacaggacatgtttgttgccttgatctcttcatagaatgggtaacataacagcagcgagcattcctgaagttctctgaactagactgaaatctgcaaagcttgtcccctcaatgagggacccagagcaagtggttcaagaggactaagagagaaccagtttttagtgcaaggccccagcttctcaaatcttggtttttgagttaaaaatcacatactcatacttatgaaaatcaaagcacaaagaatggaaaatgaaaagtggagatcctcatttcttaaaagttatggttgccagggaaatcacatttaatagattgggatatatcacacacatcaaatgtccttcttatgtttatgtaaatatatatagcttttaccaaagcaaaatattattatatgtacagttatataataaatatgtggtaatatagatattggtatagagatacacatatggaatgtatattctatatacatagttttacattaatatcttagatacctttcatttcactatgtatatccacttcattcttttcagtaattttgtgtttattatgtggttataccacaatggtttaaactattcatcttttaaagaatttatttctattggttgttttacaaacagagctgcaaacaacagcaatgtgccaacactttgtgtctttttttttgagacagagtctcactctgccacccaggctggagtgcggtggtgccatctcggcttactgaaacctctgcctcctgggttcaagcagttcttctgcctcagcctcccaagtagctgagattacaggcgccttccaccatgcccggctaatttttgtattttagtagagatgaggtttcaccgtgttggccagtctggtctccaactcctgacctcaagctatccacctgccttggcctcccaaagagcagggattataggagtgaaccactgcacctggccctcctttgtttctttagatagtgtttcttgaaatagattcctagaaataagattgaagagtatgtaaattttaaatttttctacagactgtgtaatttctcttcaaaaatgccgattatcaaaatgtcactttttgatactaaaaaatagattgttttaaacacacaaagtaagtagggcttatcaaaaagttaatatatcttgcatttctcacaagtatgttgaatttctcccacttgcattttacagcaggaatcctgactcagtctaactttcttatacttaaaaacataacaggccagaagttagcacacattttctatagaaggccagatagtaaatactggtgtctttgtgggttatatcatttctgttagaacaatgtgactccacctttgtcttgggaaagctgcaataaataatatgtaaaagggcaggagtggctgtgtttcaaccaaactttatttacaaaacagggtcatgctagatttgttctgaggaccatagtttcttaacctcaatctaggcaatccgtcaaataattctgcattcacaatagaagtcttgttgtatatattggctgactgtctttcctttctctaatgttaaccactgattttgtggagcatggattctagggaaataatacccaggtaagatgtctattaccatgtgtgtcttatttttaaaagagtggttaaattcttattgaggccgggcacagtggcttatgcctgtaatcccagcactttgggagcctgaggcaggcggatctctccggtcaggagttcaagacctgcctggccaacatggtgaagacccgtctctattaaaaatacaaaaattagccgggtgtagtgccatgcacctgtaatcccagctacttgggaggctgaggcaggagggtcactggaacctgggaggtggaggttgcagtgagccgacatcacaccactgcactccagcctgggtgaccaagtaagactccatctcaaaaacacaaacaaacaaacaaacaaaaaaacaaaaaccagttttattgagaaattcagtagtttttggtctttggtctgtatgtatatcacataggggtttggtaaaagtctagattcccacatccaaacccaattctcttgtgagcattttaaacgaccatcccaggtggttctggaatgctcataggtttgcatattagttacactatttatttgctgcatggccttggacaagttgttttaaccctctgagccaacatttcctcttctatcaaatgggaatattaataatacttagcccttggagacattgttagaatttgaaggacaatgaataatttttaagagagcttgacccatgagaaaaataaacttaaatgcatgaatatatatatcaagcatgaatttacctagtgcatatgcattatacactgggtgcataatattttataaaataatccttgttttataaagtagtgtttcattatttggggagaggcattaccgtcatttcctttctgttgacttcccctcttcagagttttctactcttcccctcccatcccaccaccttgctttgtcacaaaacaaagccaataggatcaccaacagtttaagactggtttactcaaaacaaattcattattttacatagctgaacatagaaatggtaaataatgttctataaatatttgttggttgacagctttggaacaatgtcctctagaaaaagctgaacgtagccacccaccttgtatgagagccacaaagaatagccatgtgcctgaatatgtgtcagccgctgtgtgactggaggggctgaggaaggggcgtagagggtgttgtgaagtcccttctgacaagcagtcaagaacgcatagaaatacattacaaaaattaaatagtctagataagttgaaatgcatgttaagaagagtcccagagtgtggttgcttgggtaggggtaggttcaggaattgaagggacgtccctagggcctgggtccctgcttcctaatctgccacaaacgtaacagtgtcttgttgcttccaggtcactcagggatttgactctgagatcaatgatgcacttggcaccagaacttggtggggttggcacagacatgccagcctcagccactttcattctggaagctgttaaaagagacagttataaaaattgaggaatcagcaagggaattcctggtcccatgctgccttcccatctctgtcttggcaagcatagggcctatccacttgttcaagattctttgcccaacctcagctccctagactttacctcagtggctcaggcggtctcctcaggcagcctcctcctgctaacacttcctcctctcttccctctgccaggggcagctcttccctggttccctgcagaccccaggtcaggccagaaaacacctctatggcccttccctgtgtcccaccaccagataggacctcaaaggcctggggtccccaggatggccctcaaaccgactggtgcccttgcaggctgccaccctccaagtcctgcttctctccagagatgggcagaagcaccagccctcgcctggcaccagcagtgagtctcataattgccatttaccattttgctaggggggcttctgggggtcctaggaaaagcagcagatgcctgggtgcttggggacctgggcattctgagggaaggagcagcgtgaccctgagtcatttttcactggggacaagtgagccaactccttctacccagtgataaaatcagaaggaagtagatggagacagcactgttcaggggatgatttggggatgagaagaactggcaggaagttggagatttgggggtgagaagaaccagcaggaagttggggatttcttgtttccccacttttcccttccatttctgtttgagccttaggtttggcctccatctccctctgtagaaattgcagctagttagatagtctgcctcttattccagctctactgggggaacataatatggtctaagaagaaatttttccagcaagaggccatctctgcaaatcacctgtgaggcagacctgtggcaattttatgactcagctggccaccaggaagcgattgtagctgggttctgccccttattgaaacctactcaatgttctccttcactaagtaggacaagaccgtaccctgcctttaaggtttatagaatagaaagtgaaaacactttggggaagaaaatcttcctgaacagatagcccagggcattttgaaaatcccttaggaagttctctgtttcacttgggtacctctgtccctggactttggcgatgtggtttgaccccagccagagagtgcagggaacaacagcaaaaggcaggacaaagactgactcgtgagaggaggcccaggaacaggggggcatcgtgagagaggaggacgtgagggcccaagagtgtgagcagaagaggataggacttgggcactcagtcaccagctgtggggtctgagctgtgtccccttctctaaagaggtaagccctgagtcatgggaagatggaaaccggggctcatgagacaggatgttttttaagcaccgtggtgtcttgttgacttgcacatgcaagggggtcttgggtaaccacagggctcagggtatttgcaggaacagttcaagtgctcacttgtcttggggctgtttgtggggaagtggtttccacagcaacaggaggtgagatattggtgttaccccagaccacacttagctacttccttctcactaaagctctgtagtcatattttccctggcagagcagaaacttctctgttatcccacagctgttctaacggtgtagacttgacttatgcaatgatgccaggagtcctgagcagcacagcccaacttcaatcacacacagatggacagagctgtattagcaaagcctgagctactgagcgatgagagtacagccaggctttcagacatctgttcattcaagagagatatgcgctaagccaaggacctaaagatgtgtttaatatgggtgctaatatgcataaggaaccttgaaataaatgttcttagcctttggccaagagggtccatgtctaggaatctattctccatagaaataaattcaaatatggaaaaaatgaacaatgcataagtgtatttggtccccagcatatttatagcaacttaaaattggacccaatttaaattgcctatgatatggaaatggctaagaaaattatgggatcttcccttgattggctattaggcagcctttacaaacaatgcagtgacatgagaaatgcttatgttatggtaagcttaaaaaactcaagatgcaaatcagcttattttaatcaggagccacctagcatttgggatgtggtcaatcccacataatgtatttttgtgggtgcagttcccaggaaagaggaggaataaaaacggcaagtatgaagtgtctccttcgcttgcagtctccttgtctacccctttgtccatccactatgaaaggactcccttctgttccttaatatggacaatttctattgaggactcattgttctaagaattgtctcatctcctcctgcatcctcagtgcccgatctttggcttctatgaaggaaggtgggtagtgcttatggcagggccagttctacctttctcagtatgttctggagtgggtatgtagccccattttctagtggttaccttgacatcatgaagagtttatgtctcttttgccctagatttgggcaatagtcattcattgggcaactggaaataacacaagtcagcatctcattaaaaataaagtcattcaggaaagtggacgactaatagtttctaatctagagagcataggagaagaaatgtttaccacacacaaagtattagtgccttttatatcatcaagacaaaaataacaggaaaaagacaaacacattatagtgaaaacttgtttttcctgaccagcatctattctgcatgttccctgatgccagaaactcacatttcttcagggcaaacccccttccccaccattctcaggctttaagtttatgtaaaattcagtaaacccaaagattcaagttatgtgccttgattaacttaagcaaatcaatgaaacccatccccataaccacagcgactggttaggaattcggttcctaagtcagtcaaatccaaaagggcctagtgatgttttttccaatgggaacacagactcactcttccctgcagaaaatgaacaaggattcatgtacactggcaggtactggcagccacccagggcctctcacaggaaagggagatcagaaagagaagcaaagaggactcatgagataccacagggccgctgcgtccagccttgcctggagctagggccacctcgatgccctatagtcttggagccacaaggtgcatttactcaaagcctctttgagtttggtttgcttgtttgctttctgcctggaaactgccagcatcctgagagatacgagatctgcatctgtgcagagacacagggtttgttaaaagtcacaggccctgactgaagtgtggaactggctgaaatgagaaagtaggaggtaatttggtgaggaccttgtgaaatggaagtgagttttaaaccttacatgcatcagaattacctggagccttgtgaaaacacaggttgctgggccctagtctattaagaaaggaagtggggctcagaatatgcctttctcccaagttcccaggtgatattcaccatgctgtcctgtctgggcactaccttttgccatacccattacaaggtattgcacgtgctggttgaactatggtctgtcttattttggtgctaaaagcctgtgccaaataccaaggctgcagcattaaggaatttgttagaaaagattctgaatattggaatttagttgctgtgtattatatcagtaaggtcctttaagaaagagtttaggctactttgaaatgggctcatctgaaattgaaaaagaagaaatgcgacttgctaaaaaggcccttccagcctgttgactgagaatccagtaatctgaagactgaaagggctgtaaatgcaggattttctactctaagataaagttagcatgagcagagacaggaagatgagagacataatgaggccaagcgtcaaatattcatcacctccacatgggccaagatgcaggcagaggtctctcaccaggggctgggaggtcggggtgacaatggtagtgcagtctgtgctagaaagtgcacatccccagctgggcgcagtggctcacgcctgtaagctcagcactttgggaggccaatgctggcggatcatgaggtcaggagttagaggccagcctggccaacatggtgaaaccctatctctactaaaaatataaaaacttagctgggtgtggtggcgggcacctgtaattcagctacttgggaggctgaggcaggagaatcgcttgaacccggaaggcggaggttacagtgagccgcgatcacgccactgcactctagcctgggtgatagtgggagactccatctcaaaaaaaaaaaaaaaaaaagaaaaaagaaaatgcacatccccaaccccagttaaaatgcaaatgcaaactatgtaactgacaacctgtctgcttctggctacctggcccatggaattgatcagaagcaaatagtagcctacagacattagaagggagtcacattgccaaagaaaccataagactggttccaaaaagttgctgattgcacaatacctaaggcaacctcaggctaactcacacagacaggaagtcagcagcctccagaaagcagatcctccacattgcacatctcagattgtccatagaggacattctcccagggaggagagctagggactgccagatcagctgaactgcttaaaaatgcagtacccattctccagttccctatcaggggtctttgttcaacttactgtttgttcataacacttgtatttagggaatgttgggcatgattaaacttcgtttagctttgggtttctagaccttgagaaacaattcagtgcaggcaaatattgtatgcccctatattttttcctgaaagccaataaagaaggaatgatgacaccttcactgcgtctatggggacaaaagctgcttgtgtgtgtgtgtgtgtgtgtgtgtgtgtgtgtgtgcgtgtgtgtgtgtgagagagagagagagagagagaaacagccttgtcaaaaagacgtgtttgttgctgtaccctcattatatgaaagccatcatggcatcaaaacagtataagccaggttgagctctatcctctctgcatcaactcagaatccctaccagaaagtggttgtgatggatggaatatcacccatcaaagaatagggtaagatgagaccagagaggtaagctatgcaagctaatcagaaaataactcaaagttttaaaagtgcagaatataaaaaggaaaaaccctcattcctaaaaaaaaaaaaaagcctcatttcctcaaagaaatcagttagctatttgatgtgtatctttccaaatatttgcctatgtaaatatatatgtatatatggcatttaaaaataaaacaaaataatatactttacagatagttccatagcatatgtagagaatatatatgcatatactgaatgtaattaggtctgccttttacatataatattatggacactttccacagttatagatgtgtgctactttttttttactgacttcagaatattccactgatggacatcttaatcctctactgattaatcccctactgatgactgtttgcatttctttgctgtttgccaaccacactgcaaagaatatcctcatgtctacatatcttatcttttggcagtgtttctatgaagcagattcctagaaatgggatcaggtcaaatgggatgtagttcacatagtatatgcattttaatatttgctaagtagtagtgtttatgctttaaagagttggaacactacaattctaaacatgtttggacacaaaaaatagattatttgaaacaaaatgaaataagcatagctcgtaaaaattaacacgtttggttttcacacaaatattttgaatttctctttcttctgcaaaaaggaccctagcttagtatggatttcttgtacagataatgcaaacaatccatctattaaataacttacctttcacagtaaacctatagacagcatcctgctccacacagaagctgattgtcttttccttctctaacattagctatttattttgtagagtgtagattctagagaaataatgtataatacacctgttgccatatgcagagacttaccacatttagaaaacagtggtgaattctattgacagtggctctcagtcattaacatgctatggaacacctcatgagcttgataaaaatatcagttcccaggtctacacttaaagatcctatttaagtggcttcaacaatcactgctcaaacactctatgtcaactcagaatcctgacaggaagtggttgcaatggataaagtatcatctgttaaagaatggggtaagatttgagtataggcgggtcatactttgggaaataacttggtcaatggttaacagcatagtctgtagttcaataaaagtccagttttggaacacaattgaccgtttacgtgctgtgtaacctcagccaagttgtctaacctttctgagccctgggttacttttctgtcaagtggaggtattaatagtacctaagctgtactattgcattggtaagattaaatgagcaatgtataaaaagcgctcagtaggaggagtaagcctcaacaatgtaaataattgctattaagagcttgattcatcatgaatatgccctacagaatactatgcttaatggtggccattcgagtagtgaattctcctagagcatgcatgttatgatttgagttataacatattcgtagtttcaatgttccagaactgtgtctccgttgtaaagtggataactctgtggtagccctccccatctctcccaatttccctccatttcacctcttcctaatctttgcctatgattcctcttaaccagtgattttgatttgccagaaaaacaaaaccaaactcaatactggtttaccttttaaaagagcatctttattatttccccaggccgatcacagccctgaacaaaagcatccgatacacatttgtcagtctggtggctttggtgccatgactgcctacacaggctgatgacagccactcggttgtcaccagacgcggtgtgagggaagggggaggggacaggggaactctcagagcaaacaatcacaaacacactgtgaaatcgaaaataaattacaaaaactaaatagtataaataaattaaaatttaagttaagaagagtcccacagtgtggctgtttggcaacaaccagtccatagaagaggtagctgtggaggtcacacgcatgttcccaaggctcaggctcctgctcctccccactgggcccaccgaggtcgctgggcctcgaagcttctggacccctcaggcactcagctccaggtcgctgacatatttctggacccactcctcactggggtcagcacagacctgccggcttcgcttggttaggaagctgtggagaagggaggaagagttaagcactggggaatccagcaggggaatcctgggcccaccatggccccaccattctgctctctgtcctgggcagctcagggcttgctcctctttcaggggccccctgcctatctctgtctagagagcttctctcagtgactcagtaggggtggccctcagagtgtcccgctgcctccttcttcctgtccctttcctctgggctggggcagcccttcctgactctgtaacacatgcctcactccagctccaagtcaggtcacacctcggagccctgcgtcctgtatccccgataggctcctgaaggctgggcctttccaggatagccttctggcctgtctctgccccaaccctgaccctccctacctccatagaggtgagcaggaagactggcacttacatgacaccgggcttggagcactggctgctcgtctcaaagtagtcagctatgaaattctgtggaatctgccgggaggtgtagctgaagcagcaggcggtcggcgtgtcagcagcaactgtggagaaaggaagagaatgagcccgagtcacagctcagaagaaaaggccaggcagcttctgatccccgagcagttgaggaaggcaggcttgctcagaccaagtgactggaaggcatttgggcatttttgctgagaaatgtctctttgtttctgtctgtatccttctttctccttgactcttcatagtgggttctctgtttctctgtgtgatccagatacctgaacggactgttctcttatctcagttctcttcagggaattttgtctggttcaagaagtcataccccaacccaagagaagccttggacatctctcataagacatccaagggacagagctcctgggagacctagagtgagctggagagtgaacaacataccccactgggaagtaagcagccctggattctgcctcttgctaactgattcgtttcgaaccctgtttttctatctgtaaaagggactgtaactcccctgcccctgcctagattctcatacctggagactagggggctaagaccccttctagagataaaaataaaagtcttaaagagaaagaccaagatgtttggcagccctttaagaagttctcttttctcttgggggcttttaggccacaagaaaagattgatgtggtctaaccatggccagagagtggtgatacccacaacgaaactcagactcacgtgatgcagagaactggttgcagagagccatggtgcagaggaggacagcaagggcagcagtggagacctgcatgattctgagcaggtgacggaatgtgggctcgagtgtcagcagagccaagaaaggactgaccactgtctgctgcccg

SEQ ID NO: 42 - DNA, 71619 bp, Homo sapiens
cacacgcacacacacacacacaaacacacgcgcacgcaaacagcagtgaggaagagaaaagcagagataagcaaggctccgcagcagcctcctttctaacttgaccctcgccagaccctggccagcatggttgtcctgaatccaatgactttgggaatttatcttcagcttttcttcctctctatcgtgtctcagccgactttcatcaacagcgttcttccaatctcagcaggtaaatgatggccacaactttcctctcttccatctgtcaggggacagggggaggaaggaagattgttttgcaatgtgtcctgatgtttttgccattcaactgttggtggagggaggttggaaggaagacggccaccccagcagcttcctgtcacccgagcttgtctcggaagccccttctgtccttgttccaaccggctcctacctggctgctcaaagcagagacactttgaaaaatggtttctgcctcccctattctccccatttgctgcatgatttcatcttggtcaggaatttgggagagcttaaaagagacagaggtgtgcaagtaatagagaagtgagtctcagatgtttctataaatacatctctgacctcttcgaagggggcttgcctcacaggggctgttgtggagtaaacaaacctctttccagacccagatagcatccatggccacaatagtccctcgaagggaaaatgcaggtggcaggggccggtggggtggggggtgaacagcggcggggcagttgcagcctcaggactaggttttccctttctccagacctgtcttcctgggtgcgacttcccttcagcctcagacaaggcagctggaggtcctgagagaagtgagctttccagggagaagtggagggggttccacagtgacagccaggtctggagctgagtgtgtctgccgggtatgaggctgggagatttggggaaggggctgtgtctgccagcctgcaaccttttctgaggtcagcagcctgttgcccttgtcttgtctgacccagagcaggggaagtattcggttactagtatggcctatttaaacctttctgaggaaactcaaatgtttccggagggcttgaaggaggcaggcagaccctcacagcccccctcaattcacctcagtgacccctgactctccccagcaaagttttagttatgcctccaacatgagtctcataaatacttcaactgagacagaaatttcactatcgctgcctttgctggaaacacagggagggccagaaatgccaggctctcagagagggcacatctctgaatccagctcccaactgctgtccattgataaaaacagctcatcagcaagttgtgtagccaacgtttgtgggccatgagggagtgactcagagactggtgtgaggctaattataaaagtgtgagaaacagaaggaggtgggggcagatttgtggagaattcaggagggtgggcaggaaaggtgagtggtggtgtcaccgtgggtgtgtgcccacatgcccctgcaaattcaagttaagagcatcaagcttcttctaggagtgagtagtcattattcattccccagttcaagggagaagcttgagagttaatttggcctaatttggtggttcttaatcatgtttgggtcatggattcctttgagaatctgctgaaggttaggacttaaggaaactcagttttctggttctagccctgcctctgatgagctccctgacttctgagagacagtggccttacactataagcaccatgtggccagggcatgtgtctctcttgtactttactgttttcccagggtcagaacagtgcctggcacatagtaatcaataaatatttgatgaatgaatgaataaaagcttctcatctgcaaactggggtttaccatcattttgtattacttaatttaaatagcaccaaagtggttaaggagttcagaaaactagagagaaaagaacctctggttttcttttgaactctttgccttggagagcaccctggcacaacatagatatctcttaggtaagctttttgcagactgtaccaatcagggcaacagcaggataaagaagcaactcaggtggttcagatgaaaagatctgaatgaagggatcactttgagaggtgtgggcggggttaagggaaccaacaaggaatgctgaggcacctagagattagcaactgcaatatgcctttaccaccctgtgcttgaaaaggcaagaggggcaaataggaaaatggatcccaggcagatttggagccttagagaaggggccattaagcaagagcattggtcatggaaggccctaaagcagggagaaagtgaaggagaagtacaccatcttctctctcctcccatccaagcaccttttggcagcgcctctcattggccaacccaacttgaagccagagggcagagcctggaggtcagggactggaacactgagggcagagagccaaggggagggttgggatggagaacaaccagtgcgcacatccacaggcacttctggctgggaatgtggtcattagacattagggaaaacaatggaatagacctagcgggaatcactaaggtaaccagctcagtatcacaaagatatgttttctccggtggtcacttggctttgcccccctaatttagtcaccatggctttatgatagcacagttcagaaataaacttaagctttaaaaaaatggaagctgttccttgtaatcctttggaaatattttccaacagtttgatataaaatattctatattcagaagcttatagactcttaattcttctgaagataggctgtgtatacacagaaaataagggcaaccaggaaaatcttttcattctatgcattataacttagtgagtgcctactgtgtgcctggcactctaatgtgtgcttcaagggacacggagacaagtaggatgtggcctctgctctgagggattccatgatcacctgcttttgaaacacaggtggcgtgtggtaaatgccccggaaaggggttgtgatggaggaagagctctcatgggcctgtaagccagtacttaccttcatagataatccactccttcactgtcttcaagaaagactattccagcagtgccatgtgcagcaccagctatctggatcagaggttcattacctggcaacctcctctgctgggtcccagaggagaaccaggaaggagcaaaaaacatcagaggccagaactgatgatagaaatgccatcgctaaagcacataatatttgatacacacaaaactatttcaggcctttattctaagcctattaactcttactttgggcaccactctaatagacatagatagtccgtgacttgaaagctggtgattatatatagcatattaaattggggagggaggagttgctgcttaagctagacacaatgacggatgataagaatgattacaagaaaaacaataaagaattaggaaatgggcctgagatttcaaaaagaatagtaggccaggcgcggtggctcacgcctgtaatcccagcactttgggaggctgaggtgggtggatcacctgaggtcaggagttcgagaccagcctgaccaacatggagaaaaccctgtctctactaaaaatacaaatttatctggatgtggtggtgcatgcctgtaatcccagctactcaggaggctgaggcgggagaattgcttgaacctgggaggcggaggtagcagtgagctgagatcgcgccattgcactccaacctgggtaacaagagtgaaacttcgtttaaaaaaacaaacaaaacatagtagactagagctacctctagagcctctgctctgtctgtaacccctgaaggcgtcattgactacagtacattaactggttttcattatgatgaacatgaatggaccagtgatgactggattgtgcctactttatcttgcttaagaaggtagataaatgccatttatatattagaatgatttctattgaacatggcaattattaaaaatgccaagattcccacgtttggtgtattgcgttaaccattggtgggtaataaaccaccgtgacacttggtagatcaaaacaacaaccatttattgttgaagttcatgtgtttgtgggtaaactgagggtcagctaatctagcttgggtttggctggccctggctggactcacttatgggtctgtggattgacttggctccagtatccacccacagtggtagctcagtagtagtacaatttccagaatgtggaggcacagacacaaagacaatgatatttaccggagggcaggccttccacacagtttaatttgtgtaattctcgcagcactcctgaatgggggcagcaccacttcccctttcagatgaggaaatggcagctcagaaaggttaagtgacttgcccaaggtcatgcagctgttatgtgggagagctggagactgaaatcctgcttctttaagtccagggctttcaccagtatataccaaatctccttatggttttggataaatagtgatattggcctttaaagtcctgtaggctaccctcctatcctctggaaactctcctctggattcttttttgtttgttttttcgagacagggtctcgctctgttgcccaggctggagtgcagtggtgcgatctcggctcactgcaaccctccgccttccaggttcaagcgattgtcatacctctgcctcttgagtagctaggagtacaggcacgtgccaccaagcctgacaaatttttgtatttttagtagagatggggttttgccatgttggccaggctggtctcgaactcctgacctcaagtgatccgctggccttgacctcccaaagtgctgggattacagccaccacgcctggcctggattctttattttccattccctcctgctttttcctcagtatatcaatgcccaaagctctagcaaaagattgaatattgctttatattaaagtgtgcatgacttgccagggtactgatttatctctgctttgatggttcttgcattttaatggaggttaaggatctaagctaaacaatactctagtgaaatggtgtcaaccagggtgtttgggggtggggagccaggggaatccacttcacaagccttccctttaggcattgtgagccgacccatccccatcgatgaccctgcagacacatgtggtttccctcattgaatacaggattttccaggaaggcaggactcttcaggtgatgtttgggtccgggtctcagaaaccagatggtgagaacacccaaatccagtcctgtagagtgagatcagatggaaggatgtgatttctgtctgggtactggaatcttctcctgttgcctgctgggatgtaacccagggcaggcattttgtggcctgtagggcctgatgtccagccccgtgctcccctgcctggaagccagccaggccaccacttgggaactatccatattcttggcactagattatggaccatttatttgtgtctgatgctgatcagctattgtttaatgctccgtaatgcacttgccagccatctcctctgatttaccgccccatatttcctatggataataaaatcagagaggattcttaaattaaagaactctctaaggggtcccaggcttcctgccaaccccatcccaagcctctgcgtgcagcagtgggctcatgtcctgttcagacacagagaggggtgggtgtgagaggtgggagactttcccttctgataagttgggccaaccccccaccttactgtttgccacactcacacctcctttttcagatccacagccaccactgccacatccatacaaaaacaacacagctccagagtgaacagagagccgctctggcttcgatgagacaccaaataacctcgtgtcccattttctttattttattttattttttattttgatttttttgagacggagtctcgccctgttgcccaggctggagtgcagtggcacgatctcagctcactgcaacctccacctcctgggttcaaacaattctccagcctcagtctccggagtagctgggattacaggctcccaccaccacgcccagttaatttgtatttttagtagagacggggtttcaccttgttagccaggctggtctcgaactcctgaccttgtgatctgtctgcctcagcctcccaaagtgctgggattacaggcatgagccactgcccctggtccccatcttctttaaatgcaattcagtcagaagtaccacttgtatttctcctatggactggcaccaatgattcccacaagcctcttgttttacaaagcactttcacaactacagttgtctttcccttcacagtagcccctactgtgaggggtcctgggtgcaaattgtgcctcccttggttatgaactgtgtgatggtgaagagctcatttcatgcagtgagccccaagtttctcatctgaagaatggatataatagtctctgtctcacagaattgctatgaggatttattaattcaacaaacatttcatgagtgccaactatatgcctggggatatgcagcagtgagcaagcagacaaaaatatcccacccacatggagtttctgtcatctctctgagaacttatccagtcctaagagatgaatgaaagacacgtgggacagagacggagtttgtgaaccagctgcccaaagaccaaatccagcctttatgcttagcccttagagtactaaaggtggggggtggtgatttctaaaaattgccttagtggctaacatttaaaaattgaatgctttaacatttaaaaacaaaaagtatttctgatatctattcagcaaaaaaattaaataaaataaagaagcaaacatcttgaaaagcaggacaagctgctggacgcacgttctggccatcactggaatggagcttctccagctcaccaagtctgctcttaacccccatccacctcccttactacatctacctctctagccccctctgggcatgtgactctggtctctgggaccaggagccctgctggcttggcctctgccttccccttcttctgcatctgcctagaatcccaaagctctgcacagcttagtttgaaagtcaacagtctagatcagagagtctcaaactacagcactggttcccagccctggttagacaaaagaatatgcacccaggttgcattatgaaagtccagagtccaagctgagcagacgaattagatcagaatctctggggtattggatcaggcattgggaatgcttaaagtcctccaggtgattctaatgtctgggcagggctaatcactgaactacggccagcatggaaatcacctggagggctttttaaactgcagaccactgagacacaccctgggaatttctaatttagtacttctaatgtgaggcccaagagtgtgatgctgctggtcggtggaccatgctgtaagagcctctgttctagctcacctctgagttcctttattagtttcctatggctactgtaataaatcatcataaacttagtggcttaaaacagcacacatctattatggttctggaagtcagaagtctgaaatcaaggtgtcgccaaggccgagctccctcagaaggctctcaggaagcatccatttcctgccttgtccagctctagagctgcatttctttcattctttggttcctggcccctttctccaccttcaaagcaagcagcatagcatcttgcttcagtggtcacattacctcattctgtgtcaaatgtcctctgcctgtctcttataatgacccttgtggttgtatttaggggccacccaagtaatccaggatgatcccctcattttaaacttcttaatttaatcatatctacaatgtcccattttccatataaggtaacatttacaggttccagggatcaggatctggatatctgtgggagccgccacaggttacctagtttttccactaggtaaacagacccacgagtgttttgttaaagtgacatcagaatcaaaggcaccgtggtgtgtactgtcttcatttgggttccttctcagaagcggagcctgagacaaggatttgagtgcaagtagtttatttgggaggtgatctcagaagggcagtggggaagtgagacagggaagagaaggcaatcagtatggagtgtgttcgggagcaggttactgctatgagcaactggggctcaattctactgggggccttagggagacaggcaggggactgggatatttatccatcaactcctggggattttcaccactctcttcttcctgcttaccccaaacaacttcccatggttggagaagcgctctggcatagacacaagactctgtagtgggaagctgaaagcatgagcaggatcgacgaatgggcgggattgatgaatgtgggcagggaagtgtcctctgctatagatagtgtgagagaacagctgtgtcctgctggcccttacacagttccttgcctccatcgcctctctggacagtaacagttatagctcagcagcccttccctgtcgggatgcagaagttgggatccagcgggccatggaaccaccactaaaaacactaaagttacctttcattgagtattttctggtcaccagactcttgacacatattatatttaatcttcacaacaatgtcacaaggtagccattagtacccctattttactaaagaagaaaggaacattcatagaggtgcagtcacacagtgcctgggtcaacattccacatcagaacttctgaccccaaaccatgacaaaggcagaatcgcagagtggttaggagtagggcctctggtgccgcactgctggagttcaaatcctgtgttcccttagctttgtgaccttggcaaattaccctgttggtgcctcagcctcctcgtctatgaaatggctgtaaaagcaggatttcactcccagagaagttgtaaggattaagtggtctaattatgagcataaagtactttcagtagtgcctggcatacaatgtgtgatatatacatatttcctgtcattctttccagaacctcttggtgtctctacacatggcaagaggtcagatctttttccataattaattgtgtcaaaaggcaaaaatcccaaatacaacccagagaactttttgcttaaaatatccagtgagttacggcaaaaaagaagagactcagcttccacccactttgcatttataaaccagcccctaaagaaggaacacgttgcccagagaaggaggcttctcgtggtgaccggcttccccagatgctttaaaaatacacctggccctcttccatctcccagcccaggagcatttagctccattcaagcccgcacttatctctcatggcaaccagcataaacacaggcatggggcgcgtgtttgggagctggtgacagctgaaggagaggcctcgtggctgctacaggctttgcaccatcaaccagctgcgggctgcaaatgaaaaaagagaggaaagaaaagaaggaagcatcggtgtgagtcgggcaggttcctccctcccaggcatcccacactttcctcactcatccttctgtaccactctcctcttccttctttgagaagtttggagaaggcatcaggagctttcctgctgctgctgggagttctgtcctgggaccatgctccacagaggactttccaggggtttcgggcctggcatggggcttcttggggacccgggaagacagggaatggggcgacattggccatcctacttggagagactttcctgcccacctgctcttcttacttcactaggattccgggtttgttccagtgtttggacttgtcccccgtatgaggggactgtcgggtgggttatgatcatgaggagttgaaactggactgccctttgtgtccaacagggccagcttggcttctgagaccgtccttactggggtggacctcatggagtggcccccaaaaggtttccagattctctgtggtcatctggaaatgaaattctcaaccactgagcacagtgtccaggaattagggaggctccaggtgaggaaacaatctgttttccttctgtcgatcttctcgagagctgcgtggagcaaggtcatggtagggaaccatcatggtggaaaacacaggagtcccctgtctctagagagcagcagggccctgcaggagcagcattggttgggtggtttgtcccctcactcttcctgtctgccagtagaaagtgaggattgaagggccgaggtgactttaggaacaatctgggccccagaaatgctttccccagagtatctgctctggcccttacttccctctgctgtggagtcctgagaataagagtgcattggctggacaggcttaggagccggctgccctgggcatgactgccaagattattttgttcatgtccagtagaagatcatatggagacatgtaggcagggggttggccatttgcctgtttacttgtgtttttagacagacttgcagcgcagtccttaggagttcaggtaaaattaggacacatctgtagtgttggacaagtcatttgctctcttgcaggacccagtttcctcatctgtaaaattaaggggtggaccagactttaaatatcctcttagacttagactttccctgactttgtggctaacatgctatttgcaaatttacagaattagcacccacacaaagaaggggtcttggcgtgtatttctcttctgagcattggcactgagaacccattatgtgagagtaaaaggcatggagttcccattcacacagctctggatttgagtgagtctccgtaacccattagctgagagatcttggccatgtgatctttgttttggtttccttccttccttccttccttccttctttccttcctctctccctcccttcctcccttcctcccttcctctctcttggtctctttctcccctcccctcccctccattcccctcccctcccctctgttcccctcccctcctgtcccctcccatcctgtcccctcccatcctgtccccttccctccttgtctcactctgtcaccaggctggagtgctgtggcaatcacggctcactacagtctctaccttctgggctcaagggatcctcccacctcagcgctccttccagtagctgggattacaggcacatgccaccataaccagccaagttttgtattttttgtagagacagggttttgccatgttgcccaggctcgtcttgaactcctggggtcagcgatccacctgccttggcttcccaaagtgctgggattataggcatgagccactatgctcagccacggtttaatttcttaatatttcagtttccacatctgtaaaatggagataataagagtctccattttagacggtgatgaggataaaatgagctaatacctacagagctttgcactgcacctgacatacagtttgctctcaattactggttgcaaccattattccaaatggtggagagaaactggaattcagccacttgcctcctcctgggatgtttcattccactatcatcccatctgctttttttttttttagacagagtctcgctctgtcgcccaggctagactgcagtggcgcgatctcggctcactgcaagctctgcctccggggctcacgccattctcctgcctcagcctcccgagtagctgggactacaggcgcccgccaccacgcctggctaattttttttttgtatttttagtagagacggggtttcaccatgttagccaggatggtctcgatctcctgacctcatgatccacccacctcggcctcccaaagtgctgggattacaggcgtgagccaccgcgcccagccccatctgctcttattcggtgctgaagattccagtttcagaactgagactctctgtctaaagcctgaggctgagttggggacatcccagtgcacaggctatggaaccggaggtctgggttcagaatcccaactccacaggaccttggatatcatagaatcaattttcctcacctggaaaaggggaatatacaatccataacatcattgcaaggatccaaggagagagcctgggaagggcccagccctgggcctgggtcagaatatgtactcaggaattactgttgtactttgaggggcaacatttgactttcaggacatgggatgctcacacctgataacaacaccttagccattctgagttctcagtagaaaggtctgctaaccagcaaagttcacaggcaggagctcttcctttggctgtgaaggagaaagcttctccccttctaagacaggggtgatcttaggaggaaaccccacaaggcactgcaatcctgagagtgtccactttttggaaattgggcagctctatgcaaaacctagcaagaagacaagccacttactgtatctagttcatccacatcagaacagaccctctgtccacatggcatctgtcttgcatgcttcctttgaggtgacaatggccatcaagtcaccaggcctgcctagtgcaggtcctcctgggcagtcagaggaaaatgattaaatatgagattttcaagtggaatgccagcaaatagtggctgatttgacatagatgcccaatattctggccatatacccatctgctgccgctttgcattttgctcaatgtttatttctaattgaagcaataaaatccatttgaattgattaagatcctccttcttcttatagttattatgtatgtaattttttttatttttagtaaagacagggtctagctatgttgcccaggctggtcttgaactcctgagctcaagcgatctgcctgcctcagcctcccaaattgttgggattacagacgtgaaccactacacctggcctgcagtgtggttttaattttcatataattaaaattatatacaatttataatatataatttaattcttatataatgaatgagactgaaaatttgcccatttttcatctatcggatgggcaaaattcaaaaggtgtaacatcagactgttggtgaaggtgtgtggaaacagacactctcatccactgctcctaggaggggatgtgaattgatgggggctttgtggaattatttgatgaataatttgatgaattattcacttatcaaacctggctttccgtctctagattcattatggccattacttaatatacatagcatttgagatacttcccctcaatcaaatgaccagtatttattgtaccgcctacaatatgcttggctacttgttatacaaatggttggagtttgtgtgagagcaaagcaatcaagacagggagacaacccatctatgttcaagtcagactctaccacttacctgggcacttatttgagcttcagtttacttatctcagataagtaatgtttcaaatgaaggcaacattccggttgtaggccgatgcttagcacatagtgctcaatatgtgttgttgagagttgtgacagctggcgttggcaggctacctaaggtagtttaaagactgtttttgtgttctgctttaggccacaggaaaacaccagaataagttacaaatgaatgaagatttaaatataaaatatgaaactataaaatgattagaaaaaaccttgtgagattttttgggtaacttgggtgtttggaaaaacccagaaaccataaaagaaaataattatacattaaattctgctacataaaaaaataatgtgggaggcgagaattctaccactgaaccaccaatgcctctcataaaaaaataatgtgtggcaaaaaccaactcaaaaggccaaaacaaactagggaaaatatttgcaagccatataataaagtgtttctttcctatatataggaaaaataatgtaagagaaaaattgacaacccaatgaaaaaaatggaaaaagtataaatggcttcaaaatgtttgaaaatattctcagtctcatttactatatgagaaatgaaaattaaaaccatgctgaaggctaggtgcagtggctcacgcctgtaatcccagcactttgggaggctgaggctagcagatcacttgagcccaagtgtttgagaccagctggccaacatggcaaaaccccatcttgctaaaaaatacaaaaaattagttgggcgtggttgcacacacctgtagtcccagcttcttgggaggctgaggtgggaggattgtttgagcttgggaggtcaaggctgcagtgaactgtgattgcaccactgtactccagcctgggcaacagagtgagacccacttttcacctatcaagtaggcaaaattcaagaggtcaaacatcagactgttggcgaaggtgtatggaaacaggcactctcatccactgctcctaggaggagacgtgaattgctggggcctttctggagatgaattaggcaatatgtgtaaaaattacaagtgcccatactttttgacccagtatttttatttctaggaatttatgtaatggatagtcttaccaacatacacagagatgcatgtggaaggttatttagttgcattgtttgcatcagcagatgtttgcaaatcatccaaatgcacatcaatgggggcagaatgaacaaattatggttcttccaaagaaagggatattatgcagccatagaaaagaaagtggggtggcacggtggctcacagctgtaatcctagcactttgggagggtgaggtgggaggatcacttgaggccaggaatatgagaccagcctaggcaacgtagcaagacctcatctctaagagaaaaatagaaaagaaaacaatgtgcatgcattttatgtagttacagaataatttcttagaaatactgtgaaaagcctggtgcactggtgtgtgcctgtagtcccagctactcaggagactgaggcaggaggatcgcttgaatctagaagttctgggctatagtgcactatgatgatgggatatccacaccaagtttggcatcaccacagtgtccttccaggagcggggtgccccattgctcagggaggggtgaacccgctcaggttagaaacagagcaggtcaaaactcctgtgctgatcattagtgggattatgcctgcactccagcctgggcagcataatgaaatgctgtcttttaaacaaaaatactgtgaagaaaccaagagggagtatcatatgtataatagaatattacaagtaaccctttgagtaaaagggggaaaatattatacctacctatttgcttgtatatgcacaaaatattcccagaagtatacatagaaaactaagtaatggttggtaataaataattggaactgggtagctgagggagaggggtaggagaaagaattttaatgtatacttgtttgtatgttttgaattttgaatcacatgcatgtaatacctattctaaacaattaaacaaaacaccatctgtacaaaatactacctttcatctggagcacaagatggaattttttgtctttaaaagtccttagatccaaagcagcaaggagaattgagatctcagagagtttccagattggtagaatcacaggattatagtgctgcaaaaagcctaaggtttatcttgccaacttgctcagttgataagtgctagtgctcaactgagtccaaagggatcaaccctaggctccccaatttctggaatccaagggttttagtgactttgagaccaatgggtagagaagccagtctgtgccagtgggcagccatgggactcccaggaacccagcctccctcctccccacctgttgtggacccttggacaatagatcctggaggtgggatggggggtgcagggatggatctagggaaaggaataagtgagccaggtggttttgaattacaagtgcctatagagctaaactgtcaccatggaaaaatgaaggcatggaaacgtagtggctggaagcacagggtctttccacgcagtcacagttgtcagcaggtgttggaaataacccaccctttgggcccgatgcagctggaaggttttgtctctgacctatggccagatctcccgaataattctacaaacttgtcctcccctgtcaagcactggcagaagatttaatagcaccggctgatttatgttggctgctgtaatcaaattcagagtcaaggcgcagccagccatggagaggtttctttatgttcccttggctcctaatagcattgtctccgccttcctctctacttaccacatgccatttggtcaaattagaacttgaactcaaaaagcagatgcctttctttagataaggtccaaaataattctcttgtcagggaaagggggatggatttgtttccttgactctgtgtgtgcaaaggaggtatttttgatatatgacttatataaaataatgaccgacacgagatgactgattttctttcatccttgtagtgaggatagacttttcctcctcaagacatctctgtgggttaggggtgggagacagaagagaataacttcttatatggtttgcagtgattcaatgacctgctcaaggcctctcaatgagcggcttcaggttcctccaggtggcactggtgccttagctctgtgcagctccaggggcccctagacatttgccaacaagggagttgggctgacctactcccaaccctaatccttgtgaacatatcttctggttctctgttgactatctaaaattttttaatggtattctttttaaaattaggaataatttcaaacattcagagaaagtaaagataattgttcagggaacaccaatatgtccactgtttggggctgaattgtgtctcccccaaattcatgttgaagccccagtaatacccagtaccttagaatgtgactgtatttcttttggttttggttttggttttgttttttgagacggagtctcgctctattgcccaggctggagtgcagtggtgcaatctcggctcaccgcaaccttcagtttccgggttcaaacgactctcctgcctcagcctcccaagtagctgggattacaggcacccaccaccacacctggctaatttttgtattttttagtagagaaggggtttcaccatgttggccaggctggtctccaactcctcacctcaagtgatctacctgcctcggcctcccaaagcgctgggattataggcatgagccaccatgcccagccagaatgtgactatatttggagatgaggtctttataaaagtgattaagttaagataaggccattagggtgggcattaatccaacttgactggtgttcttataagaagaggaaatctgaacacacaaagagacacgaaggatgtgttccgaagagaggccatgtgaggacatggcaagcaggtggccatgcccaagccaaagagagaggcctcaggagaaaacaaaccagccacaccttggttttggccttccagcctcaaggtctatgagaaacaagtctctgttgtttaagccattcagtctgtggtactttgttaccccagccctagaaaaccaatacacgaaccgcagcgattctgcactggctatcattttgctgtaattactctatcatatatctgtttattaatcttttttattgatggatttcaagtgagttgcagatttgtcaccctctttgaagaatagaataggggaggtaaatccatgtttgattgaagaccaccagcacacctgattgaaccctctctgtggtcgggataatcagagattgtttactcatgggagtttacaaaccaggaaactgaaacccagagatgaacagtcattgggtttgattggaaagacgtgattctgggcgttggtaagtggttccaaccttagctggctgaggcgacacttctggctcttttgggtgccatttcttctgaggtttcctgctcattctctctaggtggtggtggtggaggaagatctccaccgtgtgctggtaactgaacctccagaagtctctggagtcagacatccagattcaatcctggcctactgcctactggttgtgtttgaccttgggtgcatcccttaatctccctgagccttacctgaaaatgaggatgacagtactaatatataccttgtggggctgttgcggggatcaaaggattgaatggggaacatcacggaatgtgtcccattgttggcacctcactactgggttagggcaatgctatctgctgtaacaggtgagcattttagtggcttatcctaatcaaaatttattttttgctcacctaacagtccatgtccctggttgggggcagtgcacctccattctggcattcaggggtgcaggccctttacatcccgtggctccactgtcccccaggaattgagtctgtgcacccaggcagaatcattggcaagaataatgacatgcccccatctctctatactgcagagggctgggaaatgcagctacttcacagggctcactctggcctatggaagagggagcacacattttggagggaatgttagccttttccacacagtctcaactcagagaaggtcctctgatgggaagtcagtggctgggagttagtagaggaggcagccagctaacccggaaactgccccaccagactagagcagtgaggacagcaggaaggttggaagtggttgggaaccagtgagccatcaccaagggtcagcgtcagatgaccacaggaggtcacctcctcctagggctgtgtgcaaggtgcctttggaactctgaccccaattctgtacttgctatgtggtccagatcaagtgacttaacttctccaagagtcatttttcgcctctgtaaaatgaggataatcagttgtgagggttaaatgcaataatgcctgggaaatgctgagcatgggtcatcgtcgtttcgtgatgtgggttttgccaaacgagtctgcaagtatgcagcgcaggcaatgctccttcccctcatctcagggaggatgatactaacaagtcatgaccctctttcctcagagtccttcttaacacagcattccaggaaacctgtattcatcagtgcaagttaggccgggcgtggtggctcacacctgtaatcttggcagtttgggaagccaaggtgggcagatcacaggaggccagaagttcaagaccagcctgggcaatatggtgagaccccgtctctactaaaaatacaaaaaacagccaggcatggtgtttttcctgtaattccaggtactccagaggctgaggcactagaatctcttgaacccaggaggtggaggttgcagtgagccaggattgtgctgctgcactccagcctaggtgacagagggagactttgtttaaaaaaaaatttataaaagactgggcatggtggctcatgtctgtaatcccagcactttgggaggctgaggcgggtggatcacctgaggtcaggagttcaagaccggcctggccaacacagtgaaaccccatctctactaaaaatacaaaaaattagccaggcttggtggcaggtgcctgtaatcccagctactccggaggctgaggcaggagaatctcttaaatccgagaggcagaggttgcagtgaaccgagatcatgtcattgcactccagcctaggcaacaagagcaaaactccatctcaaaaaaaaaaaaaaaaaaatcagtgcaagttagcagatgagatagatgaaaactctttgttcccaagagattagtcttctacaagactctcctgagtaaacaaaaccattggatctagaggtgagattaaagaaaaaattattctgacactggttaaaatggtgaggaagactttatccaagactattgcaataggtttaaagactattgtaataggacacagagatcaaccttagctccattacaacaaggacaagtggggaattatagccaagaagcaggttgggtgggtcagtggattaaaaactagtaagaggagacatcatgatagggggattttggctgaaacaacttaacaggattcttgctgaaggcagaccaggttgatcagttctcaagggtgggggattctctctaaactgacttatcaagattctggctataactggactctgcaaggatggacacagaagcccacgttcaaagcctagtcaagaggagggctcaggggaacctgaccaaagcttggccgaggaaagaatggttgtcagtgggaaggtagaactcaggtcttcctacctatttctctgcccaccaaggttttgggatgggacagcggatgtgaagtgctccagggctggtgggagccttggcactgccccaaacaggtagatgtctttgcctctggatccctgggaaggctgtgggagttatctatgtcacacaggctctctgtgaggtagtggtgggagacacagcaggagcagcatgcaaagcagaatctacttcagccccatcggcagggaacaggcctgtgtgtggcagcagcagggacaggagcacctggaacagctcccggggatgtcgtattccagaagaggtctctagcctggctgataaatcccagagctgtaattaagacaaaatactgtgaatgtgacacctgctgacagctgcaggaaggccccagaaacttgtattgtgaattagattttacaggcagctcttgccgtggtgaactggtgccaggctaaggcacctgagggaacttgagggcaaagattgttcaccaaggggtaaaaggggagatccttcacccctgtctaggaaccactgatgtttcaggaatcacagaccctgagagatgccaaagttggaaagggcttagagctcatctggtccaaggctttcattgtacatctagaaaaatccagacccacaggggaaatgggttgtcctaggtcacacagtgagttagtgccagggctaaagaccagggctcttaatcccaggctggcacacttggctggagagcaattaaaagtagttgagcatacatccagaaatttgacttaaattaaatggtgcatgcttggaaagacagagacaatgccagagaatgagacaaagttatagatagagagacacagagacagagaaagacagagacagaaaagagagtagcagaaggagagaaacacagagaagaggcagaagatattcgtgaacctgaaccattaggttcaaatagagattcaaacacctgccaagttggacaggaccccagcgatcatctagtccagctacttttgtttttacaataatgaaacaaactacagctgagtggtttacatatgtcaaacctttttagaaaaagtttgatgccatgtggttaaaaaaaacacagtaagtgcttttggtgtgaaaagtggcaaaacttccatctctgaaggtttgcgaaatgaaatttgaaaaatgaagagctgcaagaatatgactcagaatagagaaagtcaggaaaatgtgatgcagatacttctgcaactctctaggactcaggactgaggactccctggccttattgctactttctctgaggtcttagacccagtttctgagaaggacaaaggggaattccccagagaaggaacacagcctaagcctcacctcccactcctcccatcttgatatagcaagtctctgctttcaagtatcagctcaaatcccacctcttccaggaatccttccttgatatctcacttggaccctctacccctcaaccgttacccatttcttccttctataaatcccttcaggcatccctgccctatgttagccactcttctttttttaccttatacaacagttatccaagaatatgtcaataagagagcccttattcggtgccaggaattccaaaagctgtagctctaatcctcacagcaaactatcaaagtcggctttgcacgcccactttataagtaagaaagcttagactccgaaagaatgaataacttcctcaaggtcacacagctactaagtggcaaaaccaggacttaagcccaacttggatgactccagggccagtactcttcccgtgacactgaacgacacattccaagggcgggaactgtgtctagtcattatgtcttgcacaatttggtacttactgtgtttctgaatgaataaaacagtaaatgaatgaatgaacataagtgtcctttcttttgaaggttatagtgcagggcttggcaaactacagcctgtgggccgaatccagcctgcctcctatatttgtgtaaacttttacaaaacatgaccaatctcattccttcatgtattgtctatggctgctgtcctgtacaatggcaaagtgaggttgtaacggagaccatgtgacccacaaagcctaaatatttactatgttgacctttatagcaaaagtttgctgactcctgctatagcttatggtctttactaagctgatcaaaacaacagtgcttattgctaagtagtataataataatcttgtcttttataatctaaaatattgtgtgtgtccatgcttgtgcactgggtgtgcctataaagtaccagatagatttaagcatgtaactggtatatgccgcttcatccaaaaagacttgcctacatgccctttggaaatctatatattttgtttgtttgtggtttcgttgttgttgttttagttacgtttagctttgtcagcaacactttggcccagacaggattagagctgagacccctggccatgaaggtcttccctgaagcagaggagggcaggctccccttggacggtctcggtggggggttgactttgaggcttaccagagcagtcaatactgctgtggtattttgagtcaagtcggtttttgagccaaatgaaaagcagcctgtttgattgctctcaatttcctcttggcttgcagggggataagtatccctgggctcccaacctcatatcctcccctgggctgaaggcactcttgtcctccaagcctcccctacagcagtgttcatgggcagctggagcagggctgcctacccattgctactcccaggagctcaggactggctccagacccctggcatctggagcagaagcaacatcaaagcagggattggccaactcccacccctaatgccaaacaggccaggcactgggagcactcagaggcgtgacgaatctcagcctgtctccggctagtgttccctggccagtccgctttgggccctgcctcacaatgacgggctcatcattcagcctcgctcatctgctcatcatttcaggactgctctgttactcggcaggctgcttgggtgagttgtgtgtgcgtgtgtgcacgtgtgtgtgtgtgtgtggatgcacatgcattgttttggaaaaaagactcttggaaagcagactgtactaggaggttttagcagcctttaaattttttttctttttaagtttttctttcacagggctgtttctcattgtgaaagcctttaaattttaaactgctcagccagtgttgaagttgcaatgcaaaggggtttcacagtagagttggtggggacctggcatacatgctaacgggtgtgtgcacttgtctgtgtccctcttgtgaccttgactgacacaagtaccttgtgctggcagctggtaccttggctggcagctggtaccttggctttgaagtaaaatcgtgttctgtagtctgggcccccgctggcgttgggtggctgagacagtctccatcactcttgagtggactgccttgggtaatttggctcagaggcacagccaccaaaccacaaattgttctttgtaggttgtatccttgcctgctcagggacatacagcagaaggcaaactctaccatgttctttcagagaagttcaaattacgtgcaacttttaggatcagaatttgtctttcaaggtttgttgtggggattgaaggaaaattgtagggtgcagccttctctggaacatgtgaattggggggaattttgggcaaattgcattcagttaatgtaagaactttactgtagctgagacccaactcactacaataaagtcaaagcactctgagctgccatacagcgtgtgcccttggctttctctcttctttggggtctgtctctctcatgcaagttcccacaggcagggaaaggccccaaaagaggaggaggaagtaaaaagctgactagtccaccaactggacaggcaggtgcagaacagttaaatggctgcacttgtaattctctcaacctgctgaggcaggatgcttatgtcacttctttcctttgacagtttctaatgacacatttgttggattgagggggtgggagggaaggctacttgatggaaaaacagaaggcagaaatggaaatggctatttccagtaacctattgtggggctggccttgcaagagggtagatgaagatggatacagtggtggttctggtgtcatacttattttaaaaagggactaaaggaggccaggtgcagtggctcatgcctgtaatcccaacactttgagaggctgaggtgggcggatcacctgaggtcaggagttcaagaccagcctggccaacatgacaaaaccccatctctagtaaaaatacaaaaattagccaggcatggtggcactcgcctgtaatcccagctgctcaggagactgaggcatgagagtggcttgaaccctggaggcggaggttgcagtgggctgagaacccaccactgcactccagcctgggcaatagagtgagacttcgtctcaaaaaaaaaaaaaaaaaaaaaaaaaggcaaaaggactttggagatgatttgggcaaaactctttgtggtacagatgaggaaactaagtttcagattgagtaagtgagttgtactggctcacatggccacttgcacctagacttaacactctttaatcaaatccatgtctttccaagagtaaattggagaaaatcgctttccaaagatgtgcctcagtttcttgaaatgaaacaagagaaagtctccttttcaagaatgggtattgagtccaaagggcaaaaccagcatcatcgacaacaaaagcttcaaacacttgccaaagcctgcattaaacaattacccataatttggcaatgcactggccacatacaacatgagcttgatgtctttaagttgggacatgcggtcctgaagttccgtgatggttggcatttccaaggcagctgcctggtgctgagccacgtgctgctcccaggtttctgcaggctccacggagatacgcacaggattgctttcaatacaacagagccttccggggcttttccagactggagcctgagctcagacacaattctatagagacagtccatgagaaagacccacaggccactcggatgacaccaaaatagacatgtgaagtcctggcttagttgactgggagggaggagggagggggaagctgctcccaaacacgtccacctgatggaaatattctgaacaggaatgagctgtaaataaactaggctcctaaaaacaaatagcttcagggagtcaggggagggcagaaatagatggccttcccctgctgggaagaaagtgggtcaagggggaaagggtgagggggatggggtgggggagccgaacaatgcagaagcctcagccagaaatgcagctgataatttgtggtcactgaagaggtctccaatttccaggaagaaaggagagaagtgattgctttaaatgatacaaggtccttcatcagtggaaggccacacagggtgctgggtgaaggaaggcactggaggccatatatggtctggaaaaataatggtgatgagtgcatattagcagtgtgggcctgccagcctcccaggtgcttttggaacactgcagcctcagcccttagctgtgtgctgaggcaaaagagaagcaaaggagaaactgtagccaggggaccttaaaaacgttccgggattggtgtgaacctgccagcctcctccaccctacaactgaagctgcccactcctagcgactcaacactctaggaaacttggagaagcttgaggaggaatacattggcattaatgtcaagttcgggaacaatgtatccatattattttaccactgagaaaagtagcccgtgacagctggagctgccctgactctcagagctcggcatggtgttttgcaacacagaagcgatgtcacagaacaccaacttcagacagggtcaccctgtgaccttgatggattgagaagaaagtaagaatcacttgataatcacaactgaacacagacgaaaacaggactatcatccaaccacaaaagtaactaaacattctcctatccttgctaatatgagtgattgctgctgtttaaaaaaccaatcacagctttggtcttgctccactctcttctagatatgaattaaggtactcaattatagaatggccctttcttcctgatggcatccaattcagagtgaagccagacttcatttcctcagtctcccctccatcacttagcaaaatccccaaccctaggatcagtccttcccagcatcctctaactgagatgccccacggttccttccggtgtgtgttctccctctttgcagtgagtcaataaacccagcttggttccctgaagcctttgcttggagggcactgatgctatagccccaagttgttgttatgggacttgaagctccagaccttcatttctaccacatgcagtcatggtgtagagctcaagaggaagggctccggaaccagactgcctggctctgtcacttactagctatatgacttcggacaaattgcttaacctctttgcctcagttaatggatctgtaaaatggagatgatgataacaagagtagtacctagctcttagggttgctgtgaggattaggtgaatttctatgtgtgaatcacttaaatggtgccttgcatgtggtgtttgtcattattaattcagcaaacgtttgtggagtgtctagcatatgccagatacagtgctagaccctggggataaaagctggctcctgctctcccagaaagcacagtttggtcagagggatacaaggaaatagtttttccccatggaggaaacctaacataggggtaaacccagagaaaaacagcagggccactcaatcttgcctgggaagtcaaggaaagcttcctggtggagacggcatctagtggaggctgcttgtgggagggcagggagtggggtacaagcagaaggcctctgagctctgcaagcctttccaactacagatgccatttaggtactttctgcttcccacaggcctggcccagtgcctggcaaagagtgtgctcaaatgaataaatgtctaacacccataaactagtgcctgctgtgacttttctttctcaaactctgaccactgttgccctgggtaccctgcaacttcaaaaccacccttgattcttcctgcttcttccctcctgcaacatgttggccccgtttctctgcatcagtccctcccttcctgtcccgtgccctgctgcatgctcccattctccaagcctgtcctccccacacctgcaccttccttgcacacagtgttctccagcaccattttgatcctgtcactcctttaccctgcacctgccgtggtttcctacgactttccaattaaagcctaaacccttttgtggggtatccaaaacagcacaatctagccccaaattaactttccagctttccctgcatcctgaccccaacagtcactattcctttaagataagagcttcctcttcagtgcaatggcacaatctcggctcactgaaacctctgcctcccaagttcaagcaattctcctgcctcagcctcccaagtagctgggattacaagcatgtgccaccacggccagcaaatttttgtgtttttagtagacacggggtttcgccatttggtcaggctggtcttgaactcctgacctcaagtgatctgcccacctcagcctcccaaagtgttgggattacaggcgtgagccaccacgcctagcctgtttgacatattttggagtgcctgtctgcctggccttcctcaggagaaactcctcccacagcctctgttgagctggtgacagaccctgagatcctgctaaagactgggtctgagtctggtccagggcaggctctgcttagctgcccccatgacctgtcacctggctgggcaaacagattccctgtggtggctatttgaactaagacccacaaggggatgttccagacaaagcagatgggggaggtaaaagaggtgaggcaagactgggtcagccgtcatggagagatgggcgtgaagacgccaaagaggatggaatggatcagatgcacagaaagaagcataaaaggggagatgggggacaggggatcgaggaaggtgagagaaataccaggacagtgtcatgtcccattgactcattggctccagctctttctgacagttgttaactttacaataaatctcctttttccccagagcccatgtgagtgaagctctgcttctcacaatccaagtagccctgaatggaacatgggtctttctcctgccattcctcccgctccctggggagcctcccctccttccatcagccacctccccagctagcccttcaaggcctagctcaagtatgcatgacttccccagatattttcgtggtctggaagtcttcctgtctaaattctccttgcttttccagaattagcatgaatgccctctttcccaaaagacagctaggtttatcccagctggtggccacctgttgttcctgtttttctgaattccttcagtccctcgttaacttgtatgacctggagtggatgctgctttggcgttgagtgctgggttctatggaactttttgtgaccaagctaagcaccaagcattggataggccaacagttttcactggggccattttggaaattttcaaggtatttttggttgtttcaaaggctgggatgggtagcatcactgtctgttgagccgggtcaggagtgagagctgtcttgcaaagggtgggatagaattgtcccacatcctccatgactttgaaatgtcccaaggaacattcgtacttatatataattatctcattctagaactgaattctcttttacacagcattttttttttttttgagacggagtctcgctctgtcgctcaggctggagtgcagtggcgcgatctcggctcactgcaagctccgcctcccgggttcacgccattctcccacctcagcctcccaagtaggtgggactacaggcgcccaccactacgcccggctaatttttttgtatttttagtagagacggggtttcactatgttagccaggatggtctcgatctcctgacctcgtgacccacccaccttggcctcccaaagtgctgggattaaaggcatgagccactgtgcccggccttatgcagcatttttaaagcactgttataatataaattgagttttctaagactacaattatggagtaatggttgtgctttatctagtcgggaattttacccagtgttgtttattatttcagaaaatcacatcacatggtggacacattccttgtagcatgagacttgccaataccataatctttatttgagctgttgcattcactgtgatttcatgtaagtgtgagcatcaaaccacagcattatgtattctaatatggttatgtctgaccacttataatcaaaatgtttacttttgtatcataaatcactttcttttttttttttttgagatggagtctcactctgttgccaggttggagtgcagtggcacaatctcagctcactgcaacctccatctcccaggttcaagcaattcttctgcctcagcctcctgagtagctaggactacaggtgcatgccaccgtgcccagctaatttttgtatttttagtagagatggggtttcaccatgttggccaggatggtctcgatctcttgacctcgtgatctgcccaccttggcctcccaaagtgctgggattacaggcatgagccaccatgcctggcccataaatcactttcttgtatttctcttttatgtagaattaagagcactgtattgattttttaaattgtctgtcagcgtgctgtactatttgtgaatttcatttccggataataaaggtgtctttataaaatatttcccgtaaaaggtcgctttaggcctgagagggctgagggtctttggcacaggccagtggaatgctccatcatcaagggtgcgagcgagtgtgtgtgcacggagctaccattcccgtggacaccgcacgacctggcgacttctggggagcacttagcacttgtctagtgtctgaggcaggtcctggagcacaaggtggagatggtcggcagatgctggcccctgggagataagacagaaaactgggttcaaggttgagagcctgtggtggtcaatgtggcgtgcatgttctgtgaggtcagaggtttcgtgaaggggtggaagtgaaggtacatcgtgacaccaaaactgagaactgaaaaaccatagctttgggtgattatggatattgctgctatgaacattttaatacatgcattttggtgaaaacacacccacttttctttttttttcttcttttttttagggccatttcaagagaaatttttactttttggtataaaaataaaactataaccattcaagctggctcttaactaaaacgtttatcttgaaaaatttgcaataacccccactggattcattaggtagggacacaaatcagggctttctcagtgcaaacaccagagaacatatatatggtcctggccaatgcccatcattcagagatgccggggaggagattcaagcttggagtcagaacctgaaactttaaagatcacttgcaatcatgattctgaatgcacccacttttctattggtaaaaacctaggagtgaaattgctgggctagagtatatgtctatgttcagctttaatagaagataacaagcaattttccaaagaggttggatcaatttacattctggccagctaatgtgtgatagttgtggttgttccacatccttgccacatttcttatattctgtcctttttgctttagccattctggtggatgtgtagtggtatcaacccaatgaacatcagcgatgttcagcagaatggatgagtaggttgtgatatagtcactcagtgggacactattcagcagtaacaatgataaacagcaacctagatgatttccatagacactatgttaaaagagagaagccaaagacaagagttcatattgtatgattccatttacataaagtgcaaaattagtcaaaatgaatctctggtgttagaattcaggatgggaaggggtgcagagattggagcttgaaggagcttctgggcactggggaatgctgtttcttgacctgggtgctggtttctaggatacgtccaccttatggagatctgttgaactgtaacttattgatctgtgtactttttgtaaggcatacttcaacattgaacatttactaacattgaacatgggtgagactttttgtaaaaataaagctacaaaggttcagggccctccctttatttcctgatactgcagattaggctacccatatattgagacattaaaccgtaactctccagtgaaatgagtgacacgtgaatgtgtttgtaaagtctagagtcaatgtatgtgttttaaatcatgggtctgggtgtcctgtaagtaatgctaccactggccctggctgcctccctgtctaaacaatttccttctgagtacaatattaaagttattagcaagcactttcttctcctcaactactgggggcatatgatgaaatctgtttgaactttgcatttcctgctacatctacaaagtgacaagtcagtatctgaggaaggagaattgaaccttataatggtcagtgtccagacaagtcatctgcttctttatgaaccatcttaatctagcaaaggcaagggcaagggaataattgctatgtcaagtagccaacaggaggcctatccacatctaacaggctagaaattagatgtggaagtctggggtggcaggatgggtcttccctgggcacggtgggtgtgacagaggcccagcactgaccacatgctaacgagcggcagttttctctgaacagcccttcccagcctggatcagaagaagcgtggtggccacaaagcatgctgcctgctgacgcctcctccaccaccactgttcccaccaccattcttcagaggtggccgaagtccggtgagtactttgggatttatgagaggaaaaaaagtgcaggctactcagtgcacaccacgcagccccacctgcctgccccactccacctgagctgcctccggaatcttttctgagagcctcaaccctccactgtcacccagaagttgagccccggaatggacattttgcagttcctggggtgtgtccattctccaaatatcttaaataaatgatggagggagattcttcttagcaggaattggatttggcaaagtttctcatcttctcaaaaaccatgaggtgaatttataatataacttcctgggttcccatcagctgctcaaacatggaatttccccttctgtttttcttctccccaagtgtttatgaaattcccttctgcagcccgtgtctaacacagaccgtttccatgaggtgactcaggaaatagttctcccgtagccacactgaggtgtgagagggagcagaatttggaaagaaaggaccaggtgaggaaaagagcaagattagggaaactggcctagaagacaacagccagggcattctggggacttgggattctcagctctttcccaacgctctgtctcctgagctgtccaattcaggagccactagccatatgtagctatctggcacttgcaatgtggctagttcaagttgaggtgtgctgtaagtgtaaaatacatactggatttcgaaagaagtagtatgagaaaagaatgtaaactatctcattagttaactttccaatactgaatatatgttaaaatgataatatttgagttttgttgggttaaagaaagtatattattaaaattaatttgacttttttctttttaccttcttgaaaggtaaaaaagtgactactagacaatttaaaattacagtgttgctcttattggtgcctcacgttagttatgtttccattggacagtgctaacctacacattggatagaggcccctgaaatgagcttccaaactctatccaaagtggctacgaggtgtctgtaatccatacaagccaggttcgtctcaagagcagatgagagaacagaaactggtagcccaaggtgtcatcttcttggggcagtcattggggtgtcagggaactgccaggcttagagacctgatcccggagcaggtctgtgtccaggatggtgacccttcctctgtcccctacgcctgacctctaactctgtgttgctttgtactgaagcttctctccccagacatgaagaatctcatgctggaactggagacctcgcagtccccgtgcatgcaaggctcgctaggctcccctgggcctcccggcccccaggttggtgcactctaccggacccctctcgctgtcttctgtttagagcaggaaagcccactgcacagagcctcttagtgtctgctctttctcatgtgatacaaagctgtttttccttctctcgcttacttcctgctccaaagccacttggatagaacactgactctttgctaggtaaattctggcctcccatccttgatttcctcatctatgcaatggggataataattgtccctacaatactgaattttgggggaatcaaatgaggatgccacctctatggatatggtttttattacagttacaatcagacaaacacttgatgacagtgccccttatgtaaccattgacccctcctgtggacccagaggtgcctgcgttcagcacaggaaagtggaggtgcagaggagatggtttcctgcctcactgggcccccaggtattgctaccaagcagcccacccctccccaccaaagctaaaggggaaacagtcaaaatgctgcagaaaggatttctagacaaacaagagtaccctccagagaccccaccccacagagtcctggcccctctggcctgcctccaagagggtgctccatcggtgagggacagctgggtctgagccttccatggggaggagaaagagggtgtaaggagcagttagttcccaagtgccttcccatgcagggggcgtaaaaatgacatcacccacctgggtaaacactcctgtggcttctggacacttgaaggctcacctggattacaaagccccacaagaggggactccggcctgtatctcctacatcacctcataccacctccattgtctcgttgactcagccacagtgaccatctctcgggttctcaaacactccaagcttgctttagccacagggcctttgcacttgtggttcctgctgtttggaatgttctttctggtttgtatcatggccagctcctgttggccactcaggactcagcttctatgccacctccttagaaatgccttcttctaccacccactcaaccacttaaagtagtctcctgcccacacgaccaccacaatcactctctgccacaatgacctactttaattctctgcatgattttttcatcctgttacagttttcttatctgttcttctgttcctggtctcccctctgtaaaacgtaagctcaatggcaggggttggcaaactatatctgtggatcaaatcctgcggcaaagtttcaataaaacatcgaagttttattgtctgtggctgctttttcacgacaaaggcagagttgagtagttgtgacagagaccaaatgtggcccacaaagcctaagatattgacaatgtagccttctaaagaaaacctgtatcaaaccttggtctgtgggaacagagacattgtccatctcactcactattatattccctgtctacaacagtgcacggggttggtataggttctccgtaattacttgttggatacaagaaagaaaacaggactttgaacccagagttggccagaggctgccacagaaaagcttggaagcctgcagaaaagcaagatgagaatcctcggaggtgcatttctatcttcccaccttcagcagtctacactaacaggtctcaggcatgctagaacccatggaatatagaaaagaaaagggggattttctgctgacctcaggacagtggctctctggtcacacacatctctaacctcgtgcaatcccctttgaagcatgtggaggctgtgttgcccaaatgcagggtcctgtgtagccaccttcatgtccttagaacacaatgtggatgctgtccctactcaaagtgaggtctgtgaaccagcaacattggtatcatatgggagctggttagaaatgcagaatgtcatccccctgacaaattcattctatcagaatctgcattctaacaagataccacccctccaccaagtgaacggagtgggtcatctgcacattaaagttggagaggcactgagctagagcacaatgaccttgtgaaatagttctagtccacttcaagaaacagaaagaactaaggcttggaagaatcaagagattggaatgaaaaccctcctcttccctatccaaaaatagaaggtgaataaaccaaagatactggttctcaaacttatctacacattacgattccctgggggagctccaaaaattactgatgcttgttcctcctcccctgagattgctatttattattattatcattattattattgggaagagagtctcactgtgccacctaggttagagtgcagtggcttgatcgcagctaactgcagccttcacttcccaggcttaagtgagcctcctacatcagcctcccacaggagggtgggaccacaggtgcacataccatcatgcctggctaatttcttaatattttgtagagacagggtctcaacacattgaccaggttggtctcaaactcctgggctcaagcaatactcccacattggcctcccaaagtgctgagattataggcataagccaccccacccagcctgaggttgttatttaattgggctgggttggggcctgggctttgggatttttcaaacatctccagagaattgtaatgtgctgatagacttgggaaccacaggctgaggggagctgttgttatttggataagttttgcagaaatcatatttcagggagggaggttccaagacagccgaataggaagagctccagtctatagccctcagtgtgagcgatgcagaagacggttgatttctgcatttctaactgagctgtgaagagagtagtggttctcccagcacagagtttgagatctgagaatggacagactgcctcctcaagtgggaccctgacccccaagtagcctaactgggagacacctcccagtaggggccgactgacacctcatacagctgggtgcccctctgagatgaagcttccagaggaaggctcaggcagcaacatttgctcttctgcaatatttgctgttctgcagcctccactggtgatacccaggcaaacagggtctggagtggacctccagcaaactccaacagacctgcagcagagggtcctgactgttagaaggaaaactaacaaacagaaaggacatctacaccaaaatcccatctgtacatcaccatcatcaaagaccaaaggtagataaaaccacaaagatggagagaaaccagagcagaaaagctgaacattctaaaaatcagagtgcctcttctcctccaaaggagtgcagctcctcaccagcaatggaacaaagctggacagagaatgactttgatgagttgagagaagaaggcttcagacgatcggtaataacaaacttctccgagctaaagaagctaaaaccttgaaaaaagattagatgaatggctaactagaataaacagtgtagagaagaccttaaatgacctgttggagctgaaaaccacagcacgagaactacacaacacatgcacaagcttcagtagccaattcaatcatgtggaagaaagggtatcagtgattgaagatcaaatgaatgaaatgaagcgagaagagaagtttagagaaaaaagagtaagaagaaatgaacaaagcctccaagaaatatgggactatgtgaaaagaccaaatctacgtctgattggtgtacctgaaagtgacggggagaatggaatcaagttggaaaacactcttcaggatattatccaggagtacttccccaacctagcaaggcaggccaacattcaaattgaggaaatacagagaacgccacaaagatactcctcaagaagagcctgcctttcaagagttcctgaaggaagcactaaacatggaaaggaacaactggtaccagccaccacaaaatcataccaaacggtaaagaccatcaacaccatgaagaaactgcatcaactaatgagcaaaataacaagctaacatcataatgacaggatcaaattcacacataacaatattaaccttaaatgtaaatgggtaaatgctccagttaaaaaacacagactggcaaattggatagagtcaagacccatcagtgtgctgtattcaggagacccatctcacgtgcagagacacacataggctcaagataaagggatggaggaaaatctaccaagcaaatggaaaacaaaaaaaaagcacggcttgcaatcctagtctctgataaaacagactttaaaccaacaaagatcaaaagagacaaagaaggccattacataatggtaaagggatgaattcaataagaagagctaactatcctaaatatatatgcacccaatacaggagcacccagattcataaagcaggtccttagagacctacaaagagacttagactcccacccaataataatgggagacttcaacaccccactgtcaacattagacagatcaatgagacagaaagttaacaaggatatccaggacttgaactcagctctgcaccaagcagacctaacagacatctacagaactctccaccccaagtcaacagaatatacattcttctcaccaccacatcacacttattccaaaactgaccacatagttggaagtaaagcactcgtcagcaaatgtaaaagaacagaaattataacaaactgtctctcagaccacagtgcaatcaaactagaactcaggattaagaaactcactcaaaaccactcaactacatagaaactgaacaacctgctcctgaatgactactgggtacataatgaaatgaaggcagaaataaaaatgttctttgaaacccatgagaacagagacacaacataccagaatctctgggacacatttaaagcagtgtgtagggggaaatttatagcactaaatgcccacaagagaaagcaggaaagatctaaaatagacaccctaacatcacaattaaaagaactagagaagcaagagcaaacacattcaaaagctagcagaaggcaagaaataactaagatcagagcagaactgatggagatagagacacgaaaaaacccttcaaaaaaatcaatgaatccaggagctggttttttgaaaagatcaataaaattaatagaccgctagcaagactaataaagaagaaaagagagaagaatcaaatagacgcaataaaaaatgataaaggggatataactactgatcccacagaaatacaaactaccataagaaaacactataaacacctctacacaaataaactagaaaatctagaagaaatggataaattcctggacacatacaccctcccaagactaaaccaggaagaagctgaatccctgaattgaccaataacaggctctgaaattgaggcaataattaatagcctaccaaccaaaaaaagtccaggaccagacggattcatagccaaattctaccagaggtacaaggaggagctggtaccattctttctgaaacgattccaatcaacagaaaaagagggaatcctccctaactcattttatgaggccagcatcatcctgataccaaagcctggcagagacacaacaagaaaagagaattttaaatcaatatccctgatgaacattgatgcaaaaatcctcaataaaatactggcaaaccaaatccagcagcacatcaaaaagcttatccaccatgatcaagtgggcttcatccctgggatgcaaggctggttcgacatatgcaaatcaataaatgtaatccagcatataaacagaaccaaagacaaaaaccacataattatctcaatagattcaggaaaggcctttgacaaaattcaacagcccttcatgctaaaaactctcaataaactaggtattgatgggacgtatctcaaaataataagagctatttatgacaaacccgtagccaatatcatactgaatgggcaaaacctggaagcattccctttgaaaactggcacaagacagggatgccctctctcaccactcctatcacagtgttggaagttctggccagggcaatcaggcaggagaaagaaataaagggtattcaattaggaaaagaggaagtcaagttgtccctgtttgcagatgacatgattgtatatttagaaaaccccatcatctcagcccaaaatctccttaagctgataagcaacttcagcaaatctcaggatacaaaatcaatgtgcaaaaatcacaagcattcctatacaccaataacagacaaacagagaggcaaatcatgagtgagctcccattcacaattgcttcaaagagaataaaatacctaggaatcaaacttacaagggatgtgaaggacctcttcaaggagaactgcaaaccactgctcaatgaaatgaaagagaacagaaacaaatggaagaacattccatgctcatggataggaagaatcaatattgtgaaaatggccatactgcccaaggtaatttatagattcagtgccatccccatcaagctaccaatgactttcttcacagaattggaaaaaactactttaaacttcatatggaaccaaaaaagagaccacattgccaagacaatcttaagccaaaagaagaaagctggaggcatcacactacctgacttcaaactatactacaaggctacagtaaccaagacagcatggtactggcaccaaaacagagatatagaccaatggaatagaacagagccctcagaaataataccacacatctacaaccatctggtctttgacaaacctgacaaaagcaagaaatggggaaaggattccctgtttaataaatggtgctgggaaaactggctagccatatgtagaaagctgaaactggatcccttccttacaccttatacaagattaataccttattaattcaagatggattaaatacttaaatgttagacctaaaaccataaaaaccctagaagaaaacctaggcaataccattcaggacataggcatgggcaaagacttcatgactaaaacaccaaaagcaatggcagcaaaagccaaaatagacaaataggatctaattaaactaaagagcttctgcacagcaaaagaaactaccatcagagtgaacaggcaacctacagaatgggagaaaatttttacaatctacccatctgacaaagggctaatatccaaaatctacaaagggctaatatccaaaatctacaaagaacttaagcaaatttacaagaaaaaatcaaacaaccccatcaaaaagtgggtgaagtgtatgaacagacacttctcaaaagaagacatttatgcagccaagagacacatgaaaaaatgttcattatcactggccatcacagaaatgcaaatcaaaaccacaatgagatatctcacaccagttagaatggcgatcattaaaaagtcaggaaacaacaggtgctggagaggatgtggagaaataggaacacttttacactgttggtgggattgtaaactagttcaaccattgtggaagacagtatggtgattcctcaaggatctagaactagaaacaccatttgacccagccatcccattactgggtatatacccaaaggattgtaaatcgtgctgctataaagacacatgcccacgtatgtttattggggcactattcacaatagcaaagacttggaaccaacccaaatgtccatcaatgatagactggattaagaaaatgtggcacatatacaccatggaatactatgcagccataaaaaaggatgagtttatgtcctttgtagggacatggatgaagctggaaaccatcattctgagcaaactatcgcaaggacagaaaaccaaacaccgcatgttctcactcataggtgggaattgaacaatgagaacacctggacacagggtggggaacatcacataccagggcctgtcgtggggtggggggagtggggagggatagcattaggagatatacctaatgtgaatgacaagttagtgggtgcagcacaccaagatggcacatgtatacatatgtaacaaatctgcacgttgtgcacatgtaccctagaacttaaagtataatttaaaaaaagaaatcatatttcaaacaggctttgcactatgcatgttcacctgcagatcctggggttgcagtgggggcctggggaattttgatgaatttcctctctgctgttttggagaatttggaaaacagctgactgagcattttgcaggcacattctggctgtggatatgcaaagctttgatgcagtgagttgtagggtccctgagctagagtcagctcctctccaaggcacaaaaatgcactctttacttgccaacattcttagtgtcttaaaaaagaagacttttttcctgctgaagaaaggcaaaaattatttggcacctagtacccacaaattgaccatgggaatttccaaggtggcagctgctgctatgtgcaaaacttaacttgtctcttgtcaggcccccagggaagtttggcaagagtaactgaaaagatatgagaggtgatgaagcctcttgttttcagcaaatgggatttattcaagactcttttgttgctctcaacaagcacttgggatgttttatgcaaacaaagagttacagggagaaaattaaaaccacagagtagatatgtaagcattgcaaccatggagccactggaaaaccagctcagagaaagctaaagaggaggaacagaggaggggactgggctggagggcaaaggaaaagcctccatgggtccctggagccctacatctgcccagagaatgatgttgctgctgtaggagcccagtgcaccaagagcctcacacccatccagcttcagactgatatatactttcttcactttttatcttgattgattagggtccaccggggcttcctggcaagacaggaccaaagggagaaaaggtatggaccactactttcttcaacccttctttccttggcaattccagcctgttttctgggcatcccactgagaatttcctagttgagatttccaaacatgtgctaactctgccttggtgagaggctgggttccatgatggctgggctgctgcagcacatatgggataccactggtgtattttgacgtggcctatcgacatggcagaggggccgtgagcagcagccaagcaactgagccacatggccatgcccagtcatcagctctactaaggcttctgcttccagaacatctcttccaaagcagcctctccttacctgtcttctccatccatagggggagcttggccgaccaggaaggaaggtatggtctgcgctgttctgtgagtgtcacatgagcgtctgtgcttcatgtgtgtgcatgcactcctagggaggggggaacagcaatgcacttcagtggtcactgatacccaggtggacagtgatggtgctgctgtctcgatggtgacagtagtaaccttgccctttctgtcaacttctttgttcaggagcaggagcctgctactgccaggcattcagacttcttccgggggctgccaagcctggccaaattccacccctctcacttcccgccccaaccccagaccatctcactctgctacccatcagagaaacccttcatagctccaaccagtgacattgaatgactgtcactctctgtttgattaaatttgaataaagtgccagagcagacagaaacaaatggcttttgctttttggctcagctgaaataaatggaggttacttaaggtcacggtgactctgcgtgaaccaaacacatgttatcaaggctctcattagtgtcaggagggagtaaatcagctgcctattatatttgctgaggtcagtggatactggcactgaatttctaggtcttggttatagacaagcgtgcaaaactttggccaagaaagatgtccatggctctaaatataaattactatatttattgttaaatggtttattaaatggtttcatggtccacaagatccttaaacagacttttgcaagacaaagttacaactctttagggcacagatgaaaactatagccaaggcacagtggctgtctgaagtgctggggtggtctccatggcaatggtcaaaggatattctgctgtggtgtccatgctcaggcctaacaaggaccatgattgattagtgatgtcgccatggatgtgggaggcaacagtagaaaccagtacacgtgccaggatttggtatatctggtttaggggctgagcccttcacatctctagctaattgcgaaattagctaatgggcacaaggtcaagataggcccttagcacctgcacccactctctcttgcagggcttgctcttccatagccctggcttaggcagagacacaggtgacatgtaccctgtgcaagtgaatacattattatgggaccactctcgggaggaacctgtagggagaatgggagaagccaggcaaaggtgtggtatcaggtgaagtcgagctttagcagtctgatatctagggggagcttgagagtgtcaactgcccaaaggtaagggagctggactattggctgcaggaaggagagttacataaattactgggcagctccaattgctcaagggcaaaccgcagttacaggtagcagaaatgagctgttagcagcaaggaaggtagcctctgggcgatgggcactctgagcaggtcaaaaagaccttgaaagagtgctgacagcatctgctactgctccccaaatgtaatcctatctcattccatagcacatccttggaaagaacccattggaacgcaggggacttttgggtgggggtgggtagaagtgacaaaaattaaaaaaccaagaagtttagagtccctttctcaccaccctccatttcttgagaagaataaggtcttatttgatgatacagtgtgacaccaagggcttgtcaggccatcagtcttcggagagtggggatgagggtcatagtagccatgcctagagaacccactgtctcctctgggccccagagacaaaacatatttattagaagtaaagaaacaaacccagttgccctgacttttgttcttggtctttgaagggtagacctggccccccaggtgttcctggcatgcctgggcccatcggttggccaggccctgaaggacccagggtaagtgtggcatgctctcagggctcatgcggtgtcaaaacaagaggggggaagatggcagctttcctggctcctggcacatagtcagggaatcccttcttcaagagggggaagaagaagagagcttaaggactggccacagggccccagatacttcctccttcacttggcctgcaagaccttgatcagtgcaacagctctgttcctgtgggaggagaaatagggggctggtaccctcttctacaggggccgtggttctcctttgtcctaggaactagcaccccactctggtttccctgagatgacctaagaggggcttgcgtctgggaagctcttgcctgtcatgctgacctggcagggaatggagagttgagaaggtggtgttggctggctgaaggatggaaatcctacattcagagagggattgtcgagtgctgatgaaatctccttcctcagtcaggctatggaaagcaagcacatccccatctgtgcctctgtttttcccactagtagtcatagactagagggttcagaggcgtgactcagagttttatctgcagaagtcagagctgggcaggtggatctcaccatctgctctgatttgtttactggctatattatagcagtggaaaactgtgtgtccagtcctcttaggaaaagtcccaaaaggatattttaaaaatcctctgcatacagctgagctgtcctgcacagcagccagtagccacatgtgaccctcaagcccgtggaatgttgctagtgctactgaggaactgaatttttaaattttaactatttgaattaacctttactaaattcagttatttgaaaatgttaaagtatgtttggagcaacttgaatgcatgaatctgctttttcaactataaattttatgatctctaagtacagattaaatattttggatgaaaatttagcacctgaatggagatgtgtaaatgtaaattacatagcagatttcaagtacttattatgaaaagcacaatgtaaaatatctcaataatttttgtatagattacaagttgggatgattaattagattaaaggagatctattaaaattaacttcattcgtttagttttactttaaggtgacttcttttaaaagtttaaaattaagtatgtggctcaccttatatttctattggttagtgctggtatagagtatttttagtacagagggtgggtgctggaagtcccaaccacaaatcattctgaggacccttcctatgcaaagagcaaagcaggcaatgttttttgcgtgtattgacaccttgttttctggggccccagttccgtcatgccccctccactactctctcactatcctcgctaggaaaataccaagtattaccatatacaacatcttagtgagcagttggtgtggggatctgcttcactttgggcgttttcattttatatttaatcttaaacacaagaatgaaatgtggagtacggagttttgggacctcaggagggagaaagtgggtgcatctggggtcctcagatttacaagccagccctgatatccccagttccttcccaatcttgcctgtgacttcctggttcagtttctctaaaaaatatcaccgtgggtcttttcttcttctaattcccacagggtgaaaaaggtgacctgggtatgatgggcttgccagggtcaagaggaccaatgggctccaaggtcagtgtggggtccaaatggacgttcccagatctctgtcaggctctggagcagctgctgtctacaaacatagggactgggtggggctgcagtcccggactagggaatgtcgcggatattggagagcctgcctttaccagccctttggagaacatcatgccctgggatgcaggggcatagggatgccattcctgctgttctcttgggcaggaagaaccaagcttctggacatcagagcagatggaaacctttgatcaggactttgcagagtgataaaagcaatgttccttttaggcctggtataaccacaaccctctgggacatctttgtgtttggtgctgcaaccccactaaaactcacagtgcaatgtggagacataccttaccaccacattcagggattccttctattcttccaccaaactcagaagtcctacagggctgattgtaaatgtaccttctgctttcttttagggctaccctggatccagaggggaaaaggttagtgcttttcttggatggtgtcctagagcctggtctgggctactggctctggaatcagagacatgcagagaatgggtccaggtctctctttagtctgcaactgaagccaccatccctagctattccccaccctttgtcagtggactgagagagaagtgagggacctcctgaagcagggcaagctggtaagagaagggctccccatagaggcagaggcccctcgtgtggagcacataagcaaatgaaggccgtgccaggtagagaataagcacagtttgcacagagtgctggaggaaattggtgatgcatgtctttaggccaagctttcaccaccacacaaccttctgacctggccaaaaaccaaatcaaaacagcatcaacctgtggacaaatttcctacaggatgagagaggatttggggcccagaattttccgtgagttgtcctttatgaatgcaagaggtctttggggttcaacaagaagtagatcacaaagcattccttccctggagaagtcacctgacatatctgagcctatttcttcacttgtaaaatgagggttttggtttagggagcttttcagtttgaaatgcttgaatttccctcccaggatattaactcattgactttctcctatggtttcttcctagggatccagaggtgaaaagggtgacctgggtcccaaaggagaaaaggtaatggagaaaacctttccatagaaatgataaatgtcagtgcaagtagcagcccccacccacccccatccgtggactgatgatggactgatggacaggcctccatcttgaaaatgaccaacaaagcctgtccacagccatttcaggtgttatttcagaggtgatcacaattatttgttgctcttttcacagggtttcccaggatttcctggaatgttggggcagaaagtaagtaaccttgaggtagtgaaaataggcctcaataaaaatatcaggtcctccaagcacaacaaaaagaactctgcctccttgtctatcaggcagggatggtgggtttaaccatggaaacttctattttgggacgggaagcaagttgcttttcaccctggggagagggtggcaggatggtctggagcctccctctagctcaatgggaaggaaaggacaacccatctgggttttgggtttttgtttgtttgtttgtttttttgcttttttgcttttcctacctcttagagggctgtggtcctattcaaatgcagaaacctttctcacaggggactcagatctgagccacaacggtcaaagcccctgtcagcacacaggcctcagtgtaaggcacaggtgtctttagcttaaggtcactgtgccttattgcagtccttcttcaagggcggtgcacatactgccagaaggacacaaaagtatttgaactgaagactgctaacattgtttaagagttaaattttgtatttaaatagttaaatattggccaggcatggtgcctcatgcctgtaatcccagcactttgggaggccgaggtgggcagatggcttgaacccaggagttcgagactagcctgggcaacatggtgaaatcccatttctaccaagaaaaatatacaaaacattagctgggcatggtagttcgcacctgtagtgccagatacttaggaaggtgaggcgggagggtggcctgagcccaggagtcaaagctgcggtaagccatgattgcaccactgcactccagcctgggccacagaggcagaccctgtctcaataaataaataaatagttaaatatttaatggatatcttgcttgggacaaggcttaataaaaaagggtccatttcaggtaacttaaagaaaaaaatactcagcttgggcaatatagtactatctcatctctaaaaaaaaaaaaattagcaggtcatggtggcacatgcctatagtcccagcgactcaggaggctgaggtgggagaattgcttgagcccaggtgattgaggctgcagtgagccgagattatgccactgctctccagcctgggcacagagaaagaccatgtctctgaaaaaaaagaaaagaaaagaaaagaagaaagaagtgaagaaagagagagagagaaagaaagaaaaatattcagtaaatagcaaaacagtggtatatagagatgacaaaaattgtgaaggtgactgttgaccaacatatgttttgaaacttttaccgagggttagggttggggaagaagaacaagggtagttgagggggaatgtcagagaataaagagagaaaagggcatacatggccatttggaacagctcctaagctaacatcattttggctcctcatgccataagacattgacattggaaattgttattttaacatagttctcaaaccatcatattcttcaaacatgcaaaggggatgctttgttagtatttttcatttttaaaagttcaccttaaagttttatttaccaaactaaaacaatttttatcttaccttttctagtcagtggaaagtgtttaaatattttcaatcaacatgcattaatttattatatcactaccttaagctgtcagaaactacactctgctaccctaggtagggtgttgggttaaaagaatagattaattatataagcaaattaaaggaagtgttaaaagagaaaaaacagttttacttaaaaatatttagattagcttttcattcagggcaacagtgaacgtcaaagaataataaattactgtaaaattaagtatggcagcttctctgtcctctgcaccatttactagacttcccatctgaagagttgtcttccccttttatgacaggctgttttaagacagagctgatatgatgaccataattaggtcttgggagagaaattagatcaagaaattcctgactgcttcaagctaatgtagagaagggccacacttccttctgacaatccctgaaaaaaaaaaaaaaatgctgcttgtgctgctgttttctcccagccataaagacatccccgagcctctctaaaacagccagggaaaaactgcaagcatctccatggcatgcggcatccatcctatcctctcacacgctcccattccctagagaatgttgaaggatgtatgggttggaaagaaataacagatttaaggacaattcttggtgaaacaagacattggtggcttgggtagggacacattggctgagctgacagataatttcagagctttatgtttgatcctttccatatacaggtgttccctggaattttccattgtgttatacctcctctgactgccatgtgaaaaagtgcctgggtgttttttgttctctctgagtgtctgggcagctcttcatgggcactggctgctgattaacactcatggttgctattgctaaatttttcttgttggctgtgcattctgggctgttgggggattactggagataggaatgaagcgccctgtgggctgacccaaagaaatagtaagtggggctggaatccatgtagaagaaaatggggaagaaggagagaaactaagatggagaaatgagttttgtgaaatattggccttaaactatgaaattctgcaatgggtacattgggttttgatagttcaacatagagctttacaaacaggaatattgtttccattgttctccatgcctttttcaataattatattgaagatgtgaacatatgtttggaacatctctcccacaaaagaactttcatctaaatcaaatggaagtgagctggaactcaaaccaatgcttactaagagtgggcaagcacataatcctaagcaagagtcattaaatgagtagaaacttcccaaagatgacagctggcaaaacagtgtccaatcatttaaaaacctccagatttgaatttgtgctaaaaacagcacgtaagaaaacacaacataaaattccaactagaaggaaagcgttttcccagacagcttgtagtaattagcacaggcatgctgtgctggatgccccagcctctcactgcctgttctgggtgatgatttgtctcttctatttggccatcaaaatgtgtgctgctccacacctgtccctctcaggtaacagataacccactcagaattaccttcttccttccctcctcttccatgaaagacatgtctgcctttctcatgacttcctcactctgctaaccttgcagggcagcccagttggcatagattcggaatgatcaagtagactgccctcgtagccaatgactggctagacctgtgtagatgtgcccactccacatgccctaagtcctctcttgcttctctttccttctttccagggtgaaatgggtccaaaaggtgaacctgggatagcaggacaccgaggacccacaggaagaccaggaaaacgaggcaagcaggtaaggatcccagggcttaccacccgcctgaggtcagaacttcctgacctggcagtgtgtggagtggcaggcaggtggcgttaatcagagatattctgtagaccttgactccagcatcctctgggctagcagacgggagcagcaccacttccagaagctgctggcatctctaggctagccgtagtttgaagtggatgggataggatgctccatgtgaactgtgccaaggccagaagcaagagtggatatttggttcataaaaataagtctgtcttaaccaaagcagctaggaatggaaggcagatatggtcatttacccagaaaacctattttatgcttcaatgtcccagacacaaatgaagttttaaaaatgagcctagatattttcctgctgttgagaggtcttctgggtctcaacaatagggtggtttttccctactcaggcctccaatttgtaagtgaccttttttcttgggttgattaacatgcttaaggcagttgttcattctgaactccccctggtcagcaggctcttgtgttaagccatgtgatgtgacatgactgctctagagacagccttagctgtctcatatataatcctgagaggtaaacatctttggatggaagctttttccattcttttacttatttccttaggctatatctgtggcccacaaacttaatcttacatcaagatcacctgggggtggggccggtgattaaatacagatgtacagatcccccacatcaggtgcaatggttgtagttccaagcttgccactcctcatccccagtgcctaggccttattttccaaagaccataatataattgacctggaatgagctttcagcatgggtttggttatttttttttaagctccatatgattttaatgtgcagccaggtttcagaaccataataacactatgaagccaattctggtcttttcccaatcaatttagaaagaacacaggctccaacctggaaaatttagactgtgcagtaactttcgaagttacaatcatccagtccagttttcaaactttgatcatgggtagcatggtcatggtttcacaatgatgccacagataccaatttcttaaaagtaggctcagataaaaaaggaaaaatatgggggagaaatcttttcttatatcactttatcccctcctaatgatttccattcataatattttaagcttggggttccagaagcttcctggcttccttctgtcttgggcagtgtttgccttttcctagttcctggcgataaccaaagccaggaaggccatttcttgagcctgctgagactaattccgttggaatcataaaagctacaccaaaaccacatctgggagctcagagaagttagagaaaagagcccaagctttcgacaagacattgtgaacaacccgagggtgctgcaaaccctcggtgttggggtcgttccagttgggagataacgaattgttagccttagaagcctgatgtggtatttatttttatcatgaattaatctcccagcatagtcttacatactctttgtttgttggccagcagtgctgagagtctctgaaagttattgttaagtcaatccaaagccaaaaatcagaaattcagaaggaatttcagatagtaatttctgtgccagaaggattacagagaccacttaatccagtctcctcaggttattctcaaggaagctgagggccagggaggtggagttgcttgcccaagacccctccatgaagtcagcttcaaagccaggattagaatccagagagttgagttgagaccaactttccccacatgacttcttctctcagctaccttcatgcttcaggacttgccttcaggcaagcccaggaaagcagctgttgactttattataaaaatcttctcagccgggagtggcgactcatgcctataatcccagcactttgggaggccaaggcaggcagatcacctgaggtcaggagttcgagaccagcctggccaacatacagtgacatcccacctctactaaaaaatacaaaaattagctgggcatggtggcacacacctctagtcccagctgcttgggaaactgaggcaggagttgcttgaacgcaggaggcagatgttgcagtgagctaagatcacgccactgcactccagcctgggcgacagagcaagactccgtctctcaaaaaaaaaaaaaaaaaaaaaaaaaaacttcagtaactgagaaacaatttccttgagagagatcacccaactttgtggcaaataaggaataaagaatgcctttcctggaaagctctactcagtgagtcctgctgatagagacgtggctcattctgagcgatggccgataagcggaatattccattactgctggtgtcagaatgaaggagcatttccagctccttcaagctttggcacttcctttgctcagagccagctgacatggccgttagaaaaacaagactgaactgtggctatattaagatgtgtgacttcctttgccatcctgagacccagcttggttactgcagggaatgcttcagctaggctgaggcttaagaactccctccataaacatggaatcagaaataaactctgacctcacggatcccatattcagagttcaagaactccttgcacattaccaagacggcccccagtgccatgtggacaaggcagccggtcacctgtcaccgttgtggctggaaaggagtcccaagcctgcctgctccccagatttgaggaagattacatttcatcaggtgggcaagcctgccaaggcgcaagtgtagtaagaagaaccaggtcaaaaatggcaagtgtcaatcactgctctgattaggcctgaggcaagagcagacaattagcaaattgctcaggggaagagtcaatagcatgcaccagccttggtttcggggtgactcctaagagcaaccctgagggagaacaaagagcccagtctttgctcttgatactcccagaataggcagaaaagaggacactccatgtggaacggctgtagccacagatgtgccctttttaataaaccaagacttaactacgtgaaacagatggaaccaagccagttgctgtgataattggcttgccccacatagctcttcgttctgtacaaaccacattttcacatctgagatctttgttagtttcacagacctatgtgggtgtaaatttactggcctcattttaaagatgacaaaactgaggtacaaagcaatgacatgagttacctggagtctcaaggtcaaggtgaaacctctggatttacagatcagcaaagctgcctaccattgtgtttctagcatctttgtcctccctcatttcatctggggaaaggaggtgagctagacagattccagcccatagggagtgtatgtctcatggggagacatcaatgaaatgaccacacaaataatccatatgctatgatctgggataaatgccatgaaggaaacaggctgagttatgagagcttatggtggggtgaactgactccatccaggaaggtcagggaaggctttgccatagggcatttgagctgagagccaaagggtgagtgacagttaactaggctagggggaaggaagagattttggggcagagagaagggtcttgagaagggggataatagacatggtgcccttgaagaccaaaaaggccaaaaggctggaatgaagctggaaagcctagccatgcaaggcttcgcaggctgcagtaaagagctaagtctttatcctgagtgcaacgggaagccaatgagtgaaaatagctcatttctaggcctccatttcctcatctgcccagggcctagagtagatttgactggttcctttcagctgccatgtgccacatttgtagagcaagaactaaggtctacaaatttgtagccatcactatctcaaatgtcacttgccctaagcttattaagagctcgatggtcaagacctctggagctgcatcccccactgggctcttgctccttaagtgcaaggtgatctctgatttggtgataaatggggcgggaagcttgctatgtcatgctttcataacaggctctgcctttctctctgtcagggacagaaaggggatagtggagttatgggcccaccaggcaagcctgggccttctggtcaacctggccgtccggggcccccaggccccccacctgcaggtaagagctacactgcttcacttgatccactgttggagtactggccagcctcccagagagggcacaaggagatgccagcagagatgccttgtgtttcaagttagaaactaccagagacactccaatatctttgtaatttctccacgatttagctcattcaacttttatgcaagagagataaatgccattctgaatttgttttagcattctggagaacaaatagaggacagaaaaaaagcacattaatgatgtcatttataccttaagtgaaaaataacaggaacatatttcatcaactaatacctttttctagataaaagtgtcatggctccaagcaattctcttaaacctagaagtaaaggtgacattgcaggttttttccaatttacagtgttataaaagagtccttatttgtttgcaatagctagagaaagaggctgggcatgggtggctcacgcctgttatttcagcactttgggaggccgagacgggcagatcacttgaggtcaggagtttgaaaccagcctggtcaaccatggcaaaaaccgttctgtttttgctaaaatacaaaaatacaaaaattagcctggcatggtggcacgcggctgtaatcccagctactctgaggctgaggcagaagaatcacttgaacctgggaggcggaggttgcagtgagctgaaattgtgccatctcgaaactctgtctccaaaaaaaaaaaaaaaaaaaaaagatgtagaaagaaattactaaaataaaataaaaaaataaaaagttggctgggcgcggtgggtcacgcctgtaatcccagcactttgggaggccgaggtgggcagatcacgagatcaggagattgagaccatcctggctaacacggtgaaaccccatctctactaaaaatacaaaaaattagccgggcgtggtggcgggcgcctatagtcccagctacttgggaggctgaggcaggagaacggcatgaacctgggaggcggagcttgcagtgagtcgagatcgcgcaactgcactccagcctgggtgacagagcgagactccatctcaaaataaataaataaataaataaataaataaataaataaataaataaatcaaaatataaagtctgttattgagaagggcatagatacactgcttccttgtatgttgttttcaagacggagccttgctctgtcgcccaggttggagtgcagtggtgcgatcttggctcactgcaacctccacctcccgggttcaagtgattcccctgcctcagcctcctgagtagatgggattacaggtgccttccaccacgcctggctaattcttgtatttttagtagagatggggtttcaccattttgttcaggctggtctggaactccggacctcgtgatccgcccacctcggcctcccaaagtgctgggaatacaggcgtgagccaccacacccagctgctgcttcctcttttacctcattcaattttattagctaagccctttatttcgttcccttgtcagctcatggtaggggctttcacagcacatcaactgtataaagacagtatcaagaagatcatttgttgactgcaacattttctgtcttcagttatacaaaaggaatccaaacaatttttattccaacttttttcttaagaaaatgaagacatttacaattccacagtgtattccccctcctcctgtgtttatggaactatatttgcaaccacatcatgggatgggcaagaaatgtcatattttgttagatcctttaaactaagttaaatctggctctgagagtccaacctactaggatgccaaataaattaattcaggcattattaggattttcactactcctccaacaaccacaaataggttgggcaaagatcctggtgaattatggcagaaaaatgtcagggaaggtccctccaacctttggtctactccattcacctctgaaatagagtagaaatagaaatagacttgttgtccaagtccctgtggtccacagatacctggtggctgctgttctcatgccatacgtgggtatcagaacattttcaaggctgggagtcctggtccccacagttcaactttccaaggagcaccccacaaccattctttctgagacctgtctctttctcaggatacaaggggtccctctcctgtccatgtctagggaggtctctcctcttccatccctgacccctccttcctcatactcctcatataccagcaccccaattaggagctttgtccttcagagaacagaaggcagaaagaaaagtttgtttccaatagtacctgcttttagcaagggcaagaaagcacaaactcttgctacctccttgaaatagggagaggaggaaggaaatactgggagaacaaacactgattagtatgggtaataacttatgtttgctgcgcctgtttccatgttgttaggggaatcagatttgagatgcagcccaggccatgtgcccacactccataattcatttctggaattggctggatgatctgaatgggggtcctttcaactagtcctcttcctccttggttctggaaggcatgatgtccccctggagccccataactatgagctaccaaccgcagagactgagagcttggcctgagttgtgccttcagaagggactctcttggcccctggggtacctaggggctcacaaaactgaggagtaggccaggcgcggtggctcacacctgtaatcccagcactttggaaggccgaggtgggcagatcatgaggtcaggagatcgagaccatcctggctaacacagtgaaaccccatctctactaaaaatacaaaaaattagccgggcgtagtggcgggcgcctgtagtcccagctacatgggaggctgaggcaggagaatggcatgaacccgggaggcggagcttgcagtaagccaagatcgagtcactgcactccagcctgggtgacagagcaagactccatctcaaaaaaaacaaaaaacaaaaaacaacaaaaacaacaaaaaaaaacaaaaccaaaaccaaaaaaaactgaggagtagtccaggggcaatgggattggtggatgtgggatgtgtaggagatccttagcggactgggatcttaatggtctcactgtgtttatctctttgtaaaggccagccctcacctgacttgtctggttccctcctggggctaggggatggatgagaagggctaggctggagctgtcagcagcttcttggtgcctgctgtttctcttgtcttgtctgtcttcggtgtattgcaatcctgtcctcttagcaggccccgcagagtcatactttttctccctggccttccagctccctctcttccacccagtatgcccacctccctctcccttgactaccccagcctctgcccaatcacgccctgccctctacccttcagaggacaccttgccgtctgtggagctggagctattcctatggtctctctgggtccacatgaccttacatggcactcctctcaccttctgtccatccaacaaaattctctgttcctttgaagctctcttttcagtaaggccttccttggcccctaacaggatggatcaccctcccctgagccctggtcattgcctctctgttatggcctctccattggtaacgtttctgcagatgtgtttcatcttcccactagatccttgagggcgaggtaggcggctgagtcagcttcacatccccagtggcacctggtatgtgggtggacagggctgcttcctgcaggggctcccaggcaggggttctgtgggttcacagttcatctccttaggagccaagcagggtgggaccatctctttggattgatgcccccgccccccattccgtcctttgagccacttcctttctgaggaggcttcctgagtgagcgggctgaagaaggtaaagagaagatggggcaataaataatcctgctctttggaaaatattggaggggtggggagagagggcaaggaaggagttaaaaagagatattcagccgggcgcggtggcttacgcctgtaatcctagcacttggggaggctgaggtggacggatcacttgaggtcagaagtttgagaccagcctggccaacatggtgaaacccccatctctactaaaaatacaaaaattagccgggcatggtagcgggcacctgtaatcccagctactcaggaggctgagacaggagaatcacttgaacccgggaggcggaggttacagtgagccgagatctcgctactgcactcccgcctgggcgacagagtaagactccatctcaaaaataaataaataaataaataaataaataaataaataaataaataagttatccctgtgcctgggaccagttggataatcatccagagttggactaggccccccaaattggttcctgacactacctttgacagtctgatgaaagtcccaaacccattctcgggggggaaaaaactgtatatacctacatccaaggttttgcaccctgtttcccagggttccagaacccctgtcccagcgccatcgtgagatagccttggcctctgtagaccacaggttaaaactcccctggtctagtcctaccctccccttagagaaaagaatcttgaacctcaaagagaagtgatgcctgcaaggtcacagcagtgactgggggccaccctggtccagaatgggtgagtgtcagccaggcggccctagaggttgttgtgctggttcctctgccctctcctagattcccctttcctgatcctttcccactgaggcagccaatggaagcgggagcctgcctgggaaaagatggagagccaggtcctctggctgcagggggtggcgatgaaacccagctgagacatgatctcccagaggtcagggtggggaagttcaggttgctgagtcctttagtatagcctggcagaaaacaggcaggggtaacagatgccctgcagcaactgggaggaagctgcagggaaactgcagtggtggcagcaggctccctgccacatcctgttgggaggtgacctcggtttctggtgcccagctctgtgggaccagatggtgctgggggaggtggaaagggtgagagctttgtacttatctgagttagagggtaagaggggctaagaggtcggggggggaataaaggcaaaatgcctttaggatgtaatttgcaataatcaaattacaaatttggctgagtccttcctgtacccagacagagtataagtgaatcaacgtggtacctgggaattgccagcttcctgagagcatcagtattcttggacatttgtcttttgaacagcatagtgttaagtaaaacatgaattcaaatctcagcctcaccattcatcagcagctaatgggacaaactcctgactgtctctcaggccatggttctggaggagttgttggggtcacagagccttctggaaggctgttccaatgccaccctcatattcttggtcacagagcttttccacttcaatttccccaagtgcttaattacccagaatattcctagcctggtggattccctgtctctctgggctcttctgaaaatatcagaacacagactggagctcttcctacagaattatatttgtatttcttgttagaacaaacaaccataacttaggataagatattggcacagtgcccttcccctcatgctgtcagcattctgattgtacgaatacctgtcaactcgctcaggaaagttcagtctcctccgactgcagtgttttccctggggtcctggccagatctctcccctggggtcattttatttcctgcccttctggatctgtgaactgtgttcccagcccctggctgccccagatgtcatactgcctgacaccaatgactggctggcctccaaacccacccctcgctattttcccagaagaagggatccttacctatttctcttctcagtccccatctttttttctctttcctcacttcctgttagatggcttttgttctggtgcttttctgccagccagaatgtgacttttaccctcttctgaagactttttctctccaattagtcggcattcattcattcgatcatcaaacactttccatgcccctactttgtgtaagccctggtggatgaaaacaggcactagccctgtccttgtggagcgacattctactggagatcaaccttgatggaataatctcacaatatatagaatcacaaagagaagtgctgtgaagaaaggcataggaaaccatgaaattgtatcccaggtatacatgacagagtctgaggattcaaaaagtcttccttcaagaagtgatgtttgaacccagatcagaagggagttgagaggcagctggggagggatggaggatgaagggaggatgatctggcaggggaatggcccagttctcaaccttggggcaaattggaatcatcttgagagcttttaaaaatatggatgcctagcacatgtatacatatgtaactaacctgcacattgtgcacatgtaccctaaaacttaaagtataataataataataataataaaatatgggtgcctgaccaggcgcggcagctcacacctgtaatcccagcactttgggaggccaagggagatggatcacttgaggtcaggagttcgagaccagcctggccaacagagtgaaaccctgtctctactaaaaacacaaaaattagccaaacctgatggcacgtgcctgtagtcccagctactcaggaggttgaggcaggagaatcacttgaacctgagaggcggaggttgcagtgagctgagattacaccactgcacttcaccctgggcgacagagtgaggctccgtctccaaaaaaaaaaaaaaaaaggatgccttatgctaaagtggtaaaaaaattttttttaataaataaataaaagtgtggatgctgcctaggttcagttcagttttcagaagtcttgatggaattggtctgaggtgtatcctgggtatcagagcctttaaaaaccaaggtactaccctcacagttcttccacattgctagggagtacactttctgatcatatcttttcaagacatgtcctcacttcttcagcaccaggggagggtaaatgggcagagcatatactaatgttctattttcttccagaagaaatgaaagaaacccacatccagaaattcctctgtaaagatcctacattggctgggtatggtggctcacgcctgtaatcccagcactttgggaggctgaggtgggcggattacttgaggtcaggagatcgagaccagcctggccaacatggcaaaaccccgtctctactaaaaatacaaaaattagcctggtgtggtggcacacacccgtaatcccagctacacaggaggctgaggcaggagactcacttgaacctgggaggcaaaggttgtagtgagccaagatcgtgccactgcactccagcctgggcaacagagcaagactccatctcaaaaaaaaaaaaaaattctatatataagaaaaacaaaagttttttaaaacaataaaagttaacagtcaataatgtgtttgtcggcaagaagccctctgttaataatggtctaaacaaataagacattgtttttctccaataaagaaatccagaggcaggcagtagctggctttgattcagcctctgactgtcactgtcagggccccaggccccatgagcctttcgtctttcctgcatgttggcttatcttctcatgcttgtgacttcctggttgcaacacggctgctgcaacaccagacatcttgcctgtcttcaaggcaggaaggagggggaaactatcgcctaccagctatttttcttaccttagctcctccatgtcttggatcaaaagcatctctttgaacctctccctcaggcataccctgaaatgctgtggactttaaccttttttctgttgcaaaggtcgctcacatctccctggttgtttggtcttctcttccttggctctagtaacacagcagtctgttgcttcctaggacaacttataatgggacccaaaggggaaagaggatttcccgggcctccaggaagatgtctttgtggacccactatgaatgtgaataacccttcctacggggaatctgtgtatgggcccagttccccgcgagttcctgtggtaaggctttctgggagaagtctggggtggttatccgtgaggacctctcacctgatccttatggggctttgtaaaatcctttcagtaaaactaactttttttcacgactctgagtacaccctcattataggaaattggaaaatatgagaaaatcaagaggaaaaccaaattgtccatttgattgtgagtccattttggggtattttctttgtcttattaaaatctaacttttatatggttgagattatattgtataaaaatgtacttttggccgggcatggtggcttatgcctgtaatcccagcactttgggaggccaaggtgggtggattataaggtcaggagttcgagatcagcctggccgatacagtgaaaccccatctctactaaaaaatatatttaaaaaattagccgggcgcggtggtgcacgcctgttgtctcagctacttgggaggctgaggtgggagaatcgcttgaacccaggaggcggagattgcagtgagctgagatagcaccactgcactccagcctgggcaacagagcgagactccgtctcaaaaaaagttatactttgttatcttagttgaaatcctgccatgtttccacactctataaataacattttaaactttttattagggaaaatttcaaatacatataaaagcagaacaaatagtgtaatgaacccctgtgtacccttcacccaactttaataatgatcaactcatggcgagcctgtgtccttgttttctctttatgcctactcactcctgcccattctctgttgtattattttgaagtaaaccttggacatctgttcatcataatcatccatctagtgtggctgtgctacaatttacttaaccagtgttggtgtttaaccaacctattgcttattggccacccccaagctttttactaatgtaaataatgctgtaaagaatatctttgagtaggataattttaagaatcacttccagatgtcaaattacttgactatatgacattgccttttaacttaagtcttgggaacgttttaaatatttaaaaatgttaaatccgaggccgggcgcggtggctcatgcctgtaatcccagaactttgggaggccgaggtgggtggatcaccttgaggtcaggagctcgcaaccagcctggccaacatggcgaaaccctatctctactaaaaatacaaaagttagccaggcattgtggtgcacacctgtaatcccacctactcgagaggctgaggcaggagaattgcttgaacccgggaggcagaggttgcaatgagccgagatcacgctacttcactccagcctgggcaaccgcgtgagactccatctcaaaaacaaaagaaaaaaagaaaaaaaagttaaatccgagtgaatattttagtttcaaactcagacattaggaactcgattgagaagatgagggaatcaagacactcctctcacttcagaaggaatgctagagtgtagtgtgcaaacccctcttcccactgttgagcagcccaaggatagagattctgtttcctcctccagcttttttcctgccccctgcagaagtgttttctggaatcctcaccagtgtgttctctggcagatttttgtggtcaacaaccaggaggagcttgagaggctgaacacccaaaacgccattgccttccgcagagaccagagatctctgtacttcaaggacagccttggctggctccccatccaggtacccccaggccattacctcaggacatactccctgcccaggagagagatgcatccattaaaggaagggaaggccaccccactgggcctggggagggctttctacagtctgtctgcatgggagggctgagcatcctccctcaaactctctctgagcagccctccattcccccaccctgactcccaaatagaagcccctctctgagccagggttccagatggtctccacatccctgcgtgccaggttgctgtcttgatctgacccaacatttaaccagctacagagctctgggcaacaggaaaggagtacctttcccacccctgggaggaagtcaaggcatgccccccagcagtgcctttggaccaaaaccaatgacctccctgcctgcggctgcctgggtatgccatgctccagttaatgctgtgtgcttctttggccagctgacccctttctaccctgtggattacactgcagaccagcacggcacctgtggggatgggctcctgcagcctggggaggagtgtgacgacggtaacagcgatgtgggtgacgactgcatccgtgagtgaggcccagaccaggaggacctgaggcctgaacagcaggggggtgggactcagggccagccctggacaccagctgtggtgctttgggacctttctagagccagagaagggtatacccaggccaccttgtgccacccaccccagtccctgctgccccagtttcagcccaaatattaactcttccaccacccaagcacctcaccaggggcggatgtcaaggatcctgcccccagttaggccttctttatctcaaaatgtagccaccaggtcctcccagtcctacatcttagcaaaacccatgttacaggtgcagaagataaaggtgatgggctctcactttgcatggagtagtgaaaggcaaaagggagaggccaagaatctgaatgagggctcatttaccaggtagagctctagtagcaaagccctccgtaggggaaactgggccagccagagctgctgtcagcctcgtgggctgctgccttaactggtaggcagcaggctctggagggcttgcttttgtttgtttttgtttttgtttttaatcaagtaacaaaaccaggaggtgtgatggaaagcaggagctttagagtcaacagaggttgaatgcaggccctgagaaacaccaaccaccctcaggctcaaggcagaggccacatggtgggtggggtaatggggggcaatttacagctctgagcctcactttccttgcctgtaaaatgggtatgatgtgctggctgctcaagtccctagagatcctgtgagctaacatgtgcagagattatctggatatagtaagggttcaaccaccattcactgaattcatttagggcttgtggtttaagcccctgctctaaagatccaggctggggctcagggctggatgtgtggatgcaaagtcatggtccttgctctcaagaagctcaggggaggctgggcacagtggctcatgcctgtaatctcaacactttgggaagctgaggttggaggatcacttgagcccaggagttcaagaccagcctgggcaacagagcaagacccaatctctacaaaaaaaaataaaaattaaaaaaattagccaggcctggtggtgcgcacttgtagtcccagctgcttaggagggtgaggtgggaggatgatttgagcccaggggttcaaggctgcagtgaactgcgattgcaccactgcactccaggctgggaaacagagcgagaccctgtctcaaaaaaaaaaaaaaaaaaaaaacagttcaggggaaggatgacagggcagagtgggtggcgggagatgctgctgactgtctcagtgtggccgaactgtctcccgacagctccagggatggcatcccctagaaggctggccctgcccagagtcccttctgcctctggtgcacagtgtcaaataggagctctcacagtaggaaggaactaatggactgtccctgccctgtgaaaacaacgctgggatccatactccaacaccctcccatcgtgtgagagcagaggtctttgctgaagatcatgtggctccccagggacacaaggctgggctcaccagtgtcacacagaagctctctgttgacagatgagagtcaccatgcaccctcactggggctcagcagtcttccaaccctcactcccgggacccccacactggctttatgaggtggaggtcatgtcagtgtcccagttttgcagataacaacctggagtctccccacccctcagctagtaagttgtgaggcggggctggagccaggatctccttcttcttgtcccatggcacatcgctgtgggaccagagcctgtgggcagtccctggaggagtgtgaagcttaatggaggtcagttctttaaggggtgcagcacttaggttggatcccttgggccgcatggtccttacaagctgaggcaagcctatcgcctctgctccttctcaagactgcacctccttatgtcccctcaggctgtcaccgtgcctactgtggagatggtcaccggcatgagggtgtggaggactgtgacggctctgactttggctacctgacatgcgagacctatctccctgggtagggatgactcccctccctccctctcccccttctttctccctccctcctctttgctttccttctttccttcacaaatattttgagtgcctctccactttgtggtgccttctagacactgaggtatggtgatgaatgacacaacacgtgctccctgcctaccacgtgccctcttggtcagcactgcctgcgtgccactgagactgagccacggcacccacagccacctgctccatccaaggcccagaggggagctgcggtctctgagctcagctgctgccctgcatgagcagcccccaaacccagtggtcaccatgactacatagtctcctgggctgtgggcctaggtgggaagcccagtggagagtaaaggtctcagggcatttccaagaatcgacatgtctacctaacctgacttccctggaacaccctgcccatccctcaggcatgcctgtgactgcaagtgagatcaaatcagccttaatatctaattttgcaagctcatggcccctccaagaaaatactccctccaaggacccctctagttatttctgagagtcctcagtggctatttatgttgttcaggacaagtattctagtgtcctggctccacactggcgcctgccaagccaactgagggccaccgccccatgaggtgctgattccatgcccagattgtaaccactgggctccttccaaggtgcagaaggtacatgtctccccagtccttacagaaccagagttgtacaacgttctcaggaaaatggggaggccgttcctttttacctaggccatgccctgctcttcactgggttccagagtggatctactggtgcttccgatctcttctgtccttgagtccagtcccttcagcttttgctcccatcccattttctcttgtagactcggacctgggcccttggcagggctggggagccatgcctgtctctccattgccttctctgtgctctctcttccaagggggtctccctaacactcagatattagcatgttcaaccaggctgggagaactacagacctgtagtctcccccagtctcccccagactctaagcccatttaggcttggccaggaccccactccatgtatgtgtctgtgtgcagtgcccctctccctgaaggaaggaagacccctgacaggcctctgccagagagttggctcttcatggctccacagagacaaatcaatgtagacgatcagatatggagtacaggatcgagtagagcccagggctcccccacgctcactgtggttacacagctattccccagaagcctcagagggacgcctgtgactgtgcctgtaaggtttaacgccctgtctcggatgatcatccgggcctacagaggtataaactgcactgtccaatatggtagcccccattcacaggctgctgttcaaatgtaaagtcattataagtaaacttaaaatgcagttactcaggccaggcactgtgactcacgcctgtaattccagaactttgggaggccaaggcgggcaggtcacctgaggttcagagttcggcaccaccctggccaacatggtgaaatcccacctctactaaaaatacaaaaattagctgagcttggtggcacgtgcctgtaatcccaggtactcaggaagctgaggcaggacaatcgcttgaacctgggaggcagaggctgcagtgagccgagatcacaccactgcactccagcctgggggacagagcgaaactctgtctcaaaaaaaaaaaaaaaatgcagttattcagtcacagtaactacatttcaagagctcaatagccacatctggccagtggcttcacagatacaggacatttttgttggtaggctgcatcgtagcaagggggattccctcacagatgctgtgctaagagcagggcaaccacctccttccacccaggccccgagctagacctcaaggcaaaaatcccagagacatgattcaactcccccaggcctctcactccaaatgagaatgggaaaaagttcttgtagagccattggcccttggccgctgtttgataaggtttgaccggaagtcaccagcatataagaggtggccttttagaacgtgtctttgcctccctcaggtcatatggagacctgcaatgcacccagtactgctacatcgactccacgccctgccgctacttcacctgagggccgtgaggagaaggtgggctgcgccccacagaactggcagcagcttctccactgtcatcaaactggccatgtcctggccccgtctccaccaacctttgtgtgacaaaaacaaggacaaattcctgctactaagacatgctgttaactcagtctgactggaagaatttaggaccactgcatcctgtcttaatccaaggtactggaaaaccttccacatgcccaacctgagacctgttccccatcgctaccatttggccaaacaaccggctacaatgctcttcctcttctggaatgttgctgacccaggccgtggacttggctgagcactgttagacacacacagacctgcaggctgttttagaatgttttgatctctttggggaatctggagtacaggcctctccgcccctgaccaccgaaacgtgcaggcattctcactcacactgggcagcccgctgtcgggtctctctaggcctatgaaccacaaagcagggaagtgggcacgttctctcggggtggctcacagctttgaacctgccaaaggacccctcgactggccacagcccagcccagcctgacgtggatgtggctgcccaggaaaagacttaactgtgaaaaagtactgagaacccacctgacccaggcttgccccaagcagaggctagagaagaggctcctcttctcagtgtttcccaaaggggcggctcttgtggtttcaaaatctctggcaccatcttgacctcttggctctctctgcactttgccccctgtctcaaaaatgtccctcatgtccatttcctgtccaggagactcatgaggactgtgtgacctgcacaagcccacacctgggcaggctgttggtgtctccttggtccttaggcagatactcccctgagtccccgatctagggccagctgcagagggctctctctaggcagagcgttcctggccagagctctacctctttgcctcctgctgacccctgacagcgtcccgtggcatttctttcatgtctgcatattgcatagccttgtcctcctgtgtgcctgagctcctcccttttcaataagattattagtcgtgcatgtctgtgagctgcctttcatcaccatttttcctgagtagggcttagttttattctggaaagacatctccaaggtgaggtccacccccacagcagacctcaagtagaaattgcccaatttttaccagctggagggacacccttgggtttttgtacgaagctatttaatgagcctgtgtcttggggactcagcaggctggagcttggggcctggtggaccatcacctggtgtctgtaggtggacccggtctcccacaggtgacatcaacctgagggtggcgtctttagagacaggcacatgggcagccctgttcccttcgcctctactgcgaggcctggggagatgttgttttcatgctgcttccaccatcacactggggtttctggatgggaaataaaaaaataaaggcagttcatttcccca

SEQ ID NO: 43 - DNA, 5358 bp, Homo sapiens
agaaagccgcgcacctcctcccgccaggcgctttctcggacgccttgcccagcgggccgcccgaccccctgcaccatggaccccgctcgccccctggggctgtcgattctgctgcttttcctgacggaggctgcactgggcgatgctgctcaggagccaacaggtatctggccgctccaggagcttctctccccaaccggcggagagggcgcagcgggccatggggccccgtgtaggcgccctccaagcctcgctttctccaggtccctgccgcgcgctccgctggcaggggggactcgctcccaagtttgcactttctctgcagaggcccctccgctcggaaggggacagaactccccgggatgttctttcctcctaggagctacgcctgaccactttccctctcttttgctctccttctgccccttcttcaggaaataacgcggagatctgtctcctgcccctagactacggaccctgccgggccctacttctccgttactactacgacaggtacacgcagagctgccgccagttcctgtacgggggctgcgagggcaacgccaacaatttctacacctgggaggcttgcgacgatgcttgctggaggatagaaagtaagtgccctgcgcgcacccaggactctcgcgctccttgcgccggcggctggtagcagcttcgccagtttcccacgtctcgctttctacaggaagttttagcctgggttttctcaagtgttaagcaaacctcatggttttcagtttcttaaaagtaatcacaaatttacaaccactaacacatttcctgtctcccaactgacattgatcataattcagtgcctgtgcggactcagggaaagatttgttccctcaccatggggtataataaatgcaagagaataacgtgttaggtacaacgtaagtgcttctctgtatttttcattaattccaaacctatgatttttatctctcctggagtacatcatttccttctgtcgattatccatcaatctgaaatatttttagtggattttattattgaagtgtgacttagctcattatataactctacttttgtcccgatacccaaacatgtgttggattagttgcgggacatggtggagattcataatactgttatattttaatttatttttaatttttaaattatatcggttaaggcctgtaagagaacatggggcttttccattcaaggaactgagccaggggaaaatgcgtattcatgtgaataagctttgattcactgcatatgtacaatcagagaacacccagagaaaacagagagtctttctactgaacttgaaagatacatcacagctgagtcagctctgaatacactgttagaaaaaaaaaaagtaaatatctggattcatgggagtattctgggtatttactatcccaacactaatacaacttctctccccccacaaaatgttgctgaaaatacagtgatggtttaataagaaggctacttttgactaacattgttctattaccctccttttcctagaagttcccaaagtttgccggctgcaagtgagtgtggacgaccagtgtgaggggtccacagaaaagtatttctttaatctaagttccatgacatgtgaaaaattcttttccggtgggtgtcaccggaaccggattgagaacaggtttccagatgaagctacttgtatgggcttctgcgcaccaaagaaaagtaaatacgatttttatggtatttctatttcacttttttgaaaagacatttgggtggaaaaaactcaatttgatgcgaaattaacatgtgcattttcatgatttcacattacttgacaagttagtgacttgtcaagttcttaggactggaaagtgacaaagccatgattcaaatttttgctttctgcctcttctgatttgttgtttttgagacggactctcgccctgttgcccaggctggagtgcagtggcacaatctcggctctctgcaacctctgcctcccgggttcaagcgattctcctgcctcagcctcctgagtagctgggactacaggcgcccgccaccatgcccagctaatttttttttttttcttctttctctttctctttctttctctccttccttcctttctctcctttctttttctctttctttctttctttctctttccttccttccttccttccttccttccttccttccttccttctttccttccttccttccttctttctttcttttctttctttctttcttttttctttcgacggggtgtcaccgtgtaagccaggatggtcttgatctcctgacctcatgatctgcccacctcggcctcccaaaatgctgggattacaggtgtaagccaccacgcccagccctgaattgtttctttagaactatttctcagctactcaatttatgcataaaagattaaagtattcattaatgaatgttatgacctcagatttgtacacaataagttatacatgtgagatagtggaatatatacagaattaagatggtgaaacttgaaaatttctttctaaagttttcggttagatttctgtattcttcagtaattgcaaattgcagcacaaacatctccacacgtttctgtcctatccatttgttacctctcccaccaccacccctgaatccttgaaatgatagtctcttgagtagtatttaatgtttgcagagggagacaatacaggcatttcccccagacacagagatttttgaaaagttcaacaaacaaggaaaacttgctttggcagagaatttgataaagctttatagctgtactgtgttgaatatgcaaaatcttgagttaatgtggtgatggttactgtggatgttctcttgtttgtgtacatataaatgtttgctccagtggttacctggaaattagtatgcatatattattgattaataatggaatgagagctgttaaaaacattaaagcaaaactaccaacacgacaaaatttaccaaatcatgccacatattgtccttgaaacttaccccatttttacctaaccatatctggtatttgggtttaacttctttttacatttaaaggatacaaagatgtagcttcagaagaaattctatccagtttacaaaaatttagaattaccaaaatatagcatgtaagcttacctgcaatttgaagcacatctttttaaaggtttagtatgatattttggattcagactgaggcttctatgggattagattttcttcagttacttcagtaatcaccataatttaaaaattctggtattataacatttctaattttcttctcttttttataaagttccatcattttgctacagtccaaaagatgagggactgtgctctgccaatgtgactcgctattattttaatccaagatacagaacctgtgatgctttcacctatactggctgtggagggaatgacaataactttgttagcagggaggattgcaaacgtgcatgtgcaaaaggtagtgaatgttttcttattccacctttagataaactttataaataacttatcagaaaaattatatttttatttatccattttactaatagcaaattgctgtttctagactacttctacataagtatctccgtagtgttaatcagttttgtcaaaatgcttttactggctagctgcagtagacggtagctgtatcttcatatcttaaaggtaaaatattattaactgagtgtataatgagttttgacttcacagtccttaaaaataagatgaagtgagctcaataaccttatcagaaatagtgatttatagtgagcctacagactggagatgtatgattttcattgtcgttttattgattttagctttgaaaaagaaaaagaagatgccaaagcttcgctttgccagtagaatccggaaaattcggaagaagcaattttaaacattcttaatatgtcatcttgtttgtctttatggcttatttgcctttatggttgtatctgaagaataatatgacagcatgaggaaacaaatcattggtgatttattcaccagtttttattaatacaagtcactttttaaaaaatttggatttttttatatataactagctgctattcaaatgtgagtctaccatttttaatttatggttcaactgtttgtgagactgaattcttgcaatgcataagatataaaagcaaatatgactcactcatttcttggggtcgtattcctgatttcagaagaggatcataactgaaacaacataagacaatataatcatgtgcttttaacatatttgagaataaaaaggactagcaaataaaactcattttgcatttaaaagttggattatattttagtcccaagaagacaaagtcgcagattaacaacactttaaaaatattactcccattttattgtgttagattgcagtacaatgaatgaataaggggatttatttaaaagatcttaactttcttgactgatttaaaaagctaatcaatttattaaagccagaaatgttctcctctgggaaagcaatttctatctatttatctaccaatccccactcacatgtatatgtttgtgtttacatagagatagatggttttaagggttttcctattgttaaattatttcctaagacattgtgggttggagaccactaaacttataaaaaaccaaggaaagtaaagtttttcaaatgtttatactgtttaaggtgtttatttatataaaccatgcatgagaaaccatgcataaatttaataatttaaatttcaccagtaaattatcattgattaaatatggtcataccaatgaaataggttttttctttctctgtaataaaacaatttttctaaattcttatgttttcatagcaagattaacatatttaattacaaattaaatatgcaaaatgacaaatgcgtttaccttttgcttgaacaatctttcatttaaaaatttatcccagttattttgacaaataggtatatgcctgagaactttgaatgatgctgaaagctagaagcaaaccaggtactcttcagtcagggactggttgaagattttatggatgaggagttagcaaaatatctatatatgcatatcttctgactcccaggatacataagaaacacagggcctagaacagtatgaataaacacacatatacacaaacatcacagaagatactaaagatattaaaaatgtttacctatagaggtttggagagaacagaggggtggacagttgtggagataatatttgtgtaaatataactgtgatatagtttttatcttggaccatgtaaatatttgacataattaataatcaaaattaaataaaaaagaaaaagca

SEQ ID NO: 44 - DNA, 1393 bp, Homo sapiens
aaacccctggtacctgagcactgatctgccttggagaacctggtgagtcggcttccttgagttcctctgttctttgtgccctgaaatgttgagtttaatctgaatatggcaagtttggtggatccaatcctatgaaaattgacttgatgctacttagtggatgaaaatttaagattagagcacaattatatgctattttagctttcttttgttatacaggtaggtatccatatggacagagaagttaaggggtaacctttgatatgaagaagaaaaaagaacaaagtatttttctttattctctgtctttctagtgtcctttacaaaggtttgtgtcttagcaggtgtgaaagactacaattctccctgagcagccctttgctctatgcccaagtcagcccacttggactttataacagataatgatgataggaatagcatattagattgcccagggtgtctgaacttgtgactgcctttcttgaattggttattttcagggaaataagatgcttgattctttataacagagataatttatttggaaaaattgtatgagaaaacacaggatttcctagggacaatgaagcaatttgttaaagtggaagggagaaaccagaaagtcttgaaaaggtaattaagaatttaaataatttcttggagattggagaaataatatgccatggtattacacaagctttggcttctctctctggaggattcccttcccacgaacactgttgtatcatttctttcagatcctgagactccagcaggatgtcttatcaacagcagcagtgcaagcagccctgccagccacctcctgtgtgccccacgccaaagtgcccagagccatgtccacccccgaagtgccctgagccctgcccaccaccaaagtgtccacagccctgcccacctcagcagtgccagcagaaatatcctcctgtgacaccttccccaccctgccagtcaaagtatccaccgaagagcaagtaacagcttcagaattcatcaggaccaagaaaggataaggatatttggctcacctcgttccacagctccaccttcatcttctcatcaaagcctaccatggatacacagggagcttctttctccttagccagtaatctgcccatgatgatccctgacagcaaaaagtttcttttctgaggctgccatactgccactgtccaggtggagactgagcaaaggaagtcctgggctgtgccagctcccagagcttcggaagaaagagcagcagctctctccctgggaaccatcagagaattctgttgatgtgttctgtgtctgtctgtcacctggtcacgagcttctaccacctttgcaattgtcacttatctttcactccctgaataaagtatctatgcatata

SEQ ID NO: 45 - DNA, 19221 bp, Homo sapiens
aaaataaacccatttgttaaggctctgggaccaacgctgggcgaaccagctccgctccggaggggtctgcgcggctggcctcgcccgccccctagcggacccgtgcgatagtgcagcctcagccccagcgcacagcgccgcatccagacgctgtccgcgcgcgcagcctgggaggcgctcctcgctcgcctcctgtacccatccagcgaccagccaggctgcggcgaggggattccaaccgaggctccagtgagagacctcagcttagcatcacattaggtgcagccggcaggccatcccaactcgggccgggagcgcacgcgtcactggggccgtcagtcgccgtgcaacttccccggggggagtcaactttaggttcgcctgcggactcggtgcaggtagctgggtgctaagcaggggtggacgggatggctagggccggtggagccatcgggacccgagtggaggtggtggggtgcctcgcactccttgttcctggaggagctcggggtgttccgagagattgtaaagtgacttctcgggattgagactcagagtccttgattatctgggtccaaagcgcaagtcaggggttccagaactttcgaggctgccgggctggggaggagccccgcgggaggtgtctatgccagggtctgggaacagcgcttgggcatcttgggctttgaggcaggggttcccccagcagggactgcagaaccgggtttccaccgaagcaggtgctgtggaagttcagggagtgacggccgaccgtcttagaaaagggggttagacggggaaggaccagagctggggtttcccaggcaagtggctatttggggatttccggaggaagtacttgaattaatgtttactaggagaggggctggtttgggggtcccgcggcaggtggatatgctgagggtcggagcctggggcgagtaggtagtttggagattccctcggggaggtgatttggttttagattcccactcccggaggaacgttgctgattttgaccctcccttctcccccagtggaagccgctgaacatcccgaggaactggcacgctgggggctctgggcttgtggccggtagaggattcccgctcatttgcagtggctcagaggaggtacctccaacggggatttctggggtggcggctgagcaacccgaggccggcggttgtgccctgttgtttcagatgagttgggttcctgggaatgggacaagcacgccctacccgcgtcggaagagaaacgcggcggtctcctcacggccctcccggtttgtttcagggtggacccagcagatccgtccgtggagtctccaggagtggagccccgggcgcccctacaccctccgacacgccggatccggcccagccgcgccaagccgtaaagggctcgaaggccggggcgcaccgctgccgccagggtcatggagggcgcgctcgcagccaactggagcgccgaggcagccaacgccagcgccgcgccgccgggggccgagggcaaccgcaccgccggacccccgcggcgcaacgaggccctggcgcgcgtggaggtggcggtgctgtgtctcatcctgctcctggcgctgagcgggaacgcgtgtgtgctgctggcgctgcgcaccacacgccagaagcactcgcgcctcttcttcttcatgaagcacctaagcatcgccgacctggtggtggcagtgtttcaggtgctgccgcagttgctgtgggacatcaccttccgcttctacgggcccgacctgctgtgccgcctggtcaagtacttgcaggtggtgggcatgttcgcctccacctacctgctgctgctcatgtccctggaccgctgcctggccatctgccagccgctgcgctcgctgcgccgccgcaccgaccgcctggcagtgctcgccacgtggctcggctgcctggtggccagcgcgccgcaggtgcacatcttctctctgcgcgaggtggctgacggcgtcttcgactgctgggccgtcttcatccagccctggggacccaaggcctacatcacatggatcacgctagctgtctacatcgtgccggtcatcgtgctcgctgcctgctacggccttatcagcttcaagatctggcagaacttgcggctcaagaccgctgcagcggcggcggccgaggcgccagagggcgcggcggctggcgatggggggcgcgtggccctggcgcgtgtcagcagcgtcaagctcatctccaaggccaagatccgcacggtcaagatgactttcatcatcgtgctggccttcatcgtgtgctggacgcctttcttcttcgtgcagatgtggagcgtctgggatgccaacgcgcccaaggaaggtagccagggctgggagacccaggaggagggagcctggtggctgggggaggcccttatcttgctgcctcagaatgtccaggggtctgtggacttcctgggggataagcgggtttgaaatcccacagagtcactgctctgtcatcccttgaccaagtgacttagggcaattaacctccctgagcctccactttctcttctgtaaggtggcaataaggataaaagtaccaactgtcaccaggcataggggaatgccacgagaaaatgcagttaaagtccttagcacagtccttgggctgcatatgggctgtatggtttactgtggtggtggaaacaggttcaagggactccatctgctttcccacgtggttaggaggaggtggtggaggtaagtttggaacccctggccaagctcaagctccttcaactttaagttcacgttaagatgaacttccactttaagttcaagaaatccagctgaagccaagaagtctggtttggacaaggacagccttgcaggagtggcaatttgtccaaccaagcacctagtagttgaagggggtgttggggggcagaggagtccaagggagaggtgaagacaaatccctgaactcctcatcgagtggaggtgatgagtctccatgcagagaggtgagtactgcaaggagtggtgggcaggcttagggaggagagcgcccaggactgagacttcacttccacttggaggaaagagaagaaagccttgagggggacattcaagtttgagggggaggctgggtgatttctgtaggtggggaatgtgccttccaggtaggaggactgctgaggacaaggctgaaggtggggcaattgtccattcttggcctgtgccagaaagctaagaggagggcatagaagagggcgacctagggagaaagcttggaggaacagaggcaccctagggctctggggtttgtggctggtgctgggtggctgtccccaaggcacagagcaccaggcagcttcctgtcactccctgccccccaacccctttccagtagctcatttggaaagaccaggagggggtgattgctggtggtgaatgatttataagtttttgtttgaaggcaatcccataacgcgtgctggatgctggggacttcaaatgtttgtaaagaaagaccaaaggatttgctttcaccctttctgcactccagacactgcaaatgtcccatttctgtgtgcagttactactgctcccaatagtctcaaatacatgcatcctgggaagccgaaatctcagtgccagctgctttcattcagtttggtaactttgctttggtcctttctgaaaatcacagactccaggctttatggaaccctcccagttagctcagtgtttgctttagtggccaagacactggttattcaatatttaccgaacacctgtggcccctggtaacaacttacagagagggttctagggccccgagaggggaaggcacttgcaccaggtcacacagcaagtcagaggcacagctgacgtttcctatgccagggttcttatgaaggacacatgatgagggagtggggttgggcaaaagccagtagtggaagtctctaagtaaggccttaggcctcacctgtttcctgggcagatctgaagaaaccagatccaggtcttgaggagctcgaacaccaactatcaagaaagtgaaaccagcaccctttggagtagatactggagagatgtggggtctagtcctcctccagcccttactagctttgggatgttagatgagagatctctttattccccttgagccttagtcttgcttttagaatgaggacatttcagcattcagttaattcattcaacagacattccactcctctctccttggggtcccctcgcctctcccattcatgtcttgagtctctggtgatttttctccttccctttcctcccagctccctcctctatggcttcctgcttttcagccccctcacttgcactcctcttctcactgtgtgtcctccctaaagaaggagagtgtgtggtcaacacgtcacacgtaccgtgaagcgaagtttagatcttttctacactttaaaagcacgtcaacaattgatttctttgtcttagaagcaaaagagagaggaaaaaacagacacacacagatcctggccagagtggaggtcataggcctcttgagtgtttgtggtcctctgaggattttcctggggaccagaccttcagtagagacgggctcctgctgaagcccaaggggcagggaaagaagaggactttaagaatttcaggtcctacttccctttgcttctttaggaattcacagggaagggtgggtgttgcatgaaaaacccagggcttctcttggtcctcctcagcattctgtctcaggtactgagaagaatccaaacacagaccggcagggattcatgatgctgctgcagccgggacctccccgctgccccaagcacacagccaggagcaggagcccagtccagatgtgagcacctcatcaaacacagaggtgatgacgtggactctggccaccaccagcctggccacatcatgcctaggcctcggggatgcaggggtcagagtggctgtgagctcagttagaacaccagccgtgtgtccacttggccttaatttggataattgcaactggcaggtggaaatggtgtctgcatcactttggagatacctctcaatccagaggctaccagcaagtgttaaggaaggaataaaagagaaccacacttgagctactcaagaggttattatcggaaaagtggaattaatgcacagccccactttcctctccaagaggacagaatttagatgcggaaatatctagaccagggccccttactccactcatcacctgaggagccagtactgaagcctgtggctaacagtgtgatgccatccagggatgcttgcaggtggagcaggctcacagggaggcaggagaggtggggcacacatgggtctgttcctgctttatcatgaaaaccccagggaggtaggggagcttagccaatggccacccatcaaggctgccagagtgggtggggaatgtcacgcttctggtggctgtagatgtggtggcccagggacccgaagtccctctctgcttcagcatttgctctctcttttccatctctcccttgagcaacttcattccctcatatgccttcacaaataccaagggctgcctttgtgggtttaaagctcaccttgttccaaaagtaatgtgcagtggtggccaaaaatttaggtgcctcaacaagataaaatagatataaggaaactgggataaagcaggcagtagggagaagaaaaggaaaaaaaactattacaataatagtaataatactattaataataatagtctctctgtgtatagacaagctctacacctggttagttgttataagaaccaaagaggaaaactttaagtttaaatatttccatgattccgaagaaagagccaatgggagcatctgggtaatttgatgagatccattcttcaaagcagccggatgccgtcgggtgctgacttggtgaggctggtgagactggatgccccatgcagggtttgacaagccctttatatatctttcagaattaaattccaaagccaaagattcggcaccagccttttcccttgaacccagtggcattttctatgctgattgcaggggctctgaccctggggcagttctgagggaggagatgaggatgaggagggagtttggtagagtggggctgtttgcatttctagggttggttgatgttgattgggtgcggtggacaggatttggggtctctgtctctagtcttctccttccagcctctccctggtaaaacgcccagtccagtgtccttaagccagttgctttacctgctctgagcctccacctcctcctccatgtaataaggatagcacggctcactgcctggggttgatgtgaggattaaatggtgtgacctatggccccttcctgatggacaagatggggattcttgtcttgagcctgggtggagggaatgggagtggacagcaggtgatgtgtccggggaggctgggaggtgggagagaagcttgttaaggccggagaggtggactatgagccctatcacagcagggacgctgcttgtcctgttccctacttgttaagcccaagtccaatgtgtgggctgttttgtggcacaactccaggggatgccttttaccccaggggatgcctggcacaaggctgcacagtcattgatagctcaaccagtgcttgccaaatacgtggaaaatgggagcagagaggtgagtgagacggggcagggatggccatgaagagctggactcaggaggaatagggactttctaagcagctgtctgaaacagaactggcaacctggaaaagaaaggagcgccccatcactggggcaaccaaacatctgtcaggagcgttggactgggaggaaggctgacaggcacaggaggcctggtttgaactgtttccccatctgtagaatgagcttcccagcccctccctgtttctgtgggactgaggatcctcgggcatgtcccgtacacctttcctttccatgaatgctgtgcccgaggtgtgggggaccaggccccttggaggggctttttcttgaggtgacccagtgatgtggagagcatggtgggccggcaggagaagcttggacaggatattcactctgggccatgaagagtgcacaagctcggcccttctgggtacaaatcacaattagatggacagttaacttcagacacttatatgattaagtaattgtgtgttcttttatgttcttagctaatgttaatgttttcccttagggtttctgccctgtggtgatttcacttcttttccccccaaaggtttgataaataacagctaaaaagacaaaaatccaaaatcaaaaaactcaaaagctaaccccaaaccagcctcttgggtgaggccctgctacatcatgtttccatttgatggctgtctgtgtgggtttcgggaggggtgaggaggggaagaggggttgtggagggcctcggatcaggaggagattagcaggtgccctggctgcatcacactgtctgtggaggctgggtgaggtctgtggccccgggctggcgtgtctgggtgtgacctgaggcactggcccacctgctgaccttaccaccttgccctggcaacttttggaagcaaaggcaaccccacagggctccctcccaggggctgaagccggaccctgtacacctgagcccacctgccagagcccccagccccaggagacagtagtgggaagtagccagtccccttctgggacctggtcttgttgccatctgtgtcatttggggcaatgtctcttgatggcctctggacctctgccattcccatctgagcaatggggataacggctcataatggagctttgacaccctctctggacctcagctttggtgaagggaggagtgggatcagttggtaacagcagccaccactggctgagtgcccactgtgagcaaggcctgtgcccaggccatttctgctcctcaccctaatgcagcaaggaaggggcccatcatggcttttctacagatgatgaaactgaggcttagagaggtgtgacctgcccacgatcactgctgagtaagtgatggagctgggattggaacccagccatcttacactagagactgacacactgcatgacgaccccaacccctgccgccccaggccagcagttttcccgatgatctacaccttcgacttggggatctcctgggcgcttgttagatcgctggacctgcctcagatccatggaagctgaaccctcccccactatctggccccaaggtcctgacatcttgggctcttcctgcaacacctacacacacacacaccgaggtacacatccgctgatggcactgccctcccagcattctgggttcagtgccatgcccctctcatcctccctgtgtccaccagttctataatctcagctgtaccacatgcctcaggttggcactttgtttctctttccattttcaccttcttggtttagagcacgattttttcaactttggcactattgacattttaggctgaacagtctttggcgtgtgtgtatgtgtgtcagggaggagctgttctgtgcatggtaggatatttaacagcattcccgtcctccacgtgctacgtgccattagcaacctccctgccagctgtggccaccaaaactgtctccagacattgccaaaagttcactaaggggcaaagtcatccctggttaagaactgctggcttagaccccttgttctgctttttaaactaatacctggcagtgagtactctcttgttgccctggtctctggccagcctgccttgtgtacccccagccaggcccgatgatttgccgctttccacaagttcctatggccttgctgtctttgcacctttgctaatactgttcctgccatgggaacgcccaccccagtttcttccacggattcccatcctttgaagcccaagtccattgtgtgggctgctttgtggcacaactccaggggatgccttttacctcatggtctatgaacagggtgttcctaggagctttgcagtgcacagcctgaacagctgaacatggcagcctcatccagtgcccctttcaggaaaccatccctgttttcccagtttgcggggcttcttcctctgaatgctaagtcattcactccaaaaaacagttactgatgcctctgcaggctcctgtccacacaacctctgctttcatctgtcaacccccaagtgaagagagttggcaaggggccctcccaagccctcgccctcctgcggccagctgctgacatgcataaatgtgggaccgtgtggtcaaggttgatcacagagttctgggtacacccacagacctctgggagggacacccacagtttctgctgggttagtgtcagatggagcggcagtgctgacttcgggtgtggggctgagcctgcccacaactcaggtttctggggttcagaatctcaggtttctgaagttcagaataggacttaggttgtatacagggtggaatatcctgctggtgcaagtcagtgtagctgatggagtgggagtcattttgggtacaggcctagcattttagcaaaggggctgcaggtccagttggcgcatggtggcaagtccaaggatgctgggaacaagagtattgaaagagaaacaactgtctcacctggaggaggcgggaggccagttggaaggttctagctctggtttagaggtaccctaggctgggtcttgtctaaggtatgggtgggagagaggtgtaaccaggtggtgtccagtgtcccagccccaaggcccaaatccttactcctgattcctgcactgaggggcagcctctgccagtatctccttttgtgctcagccgggagctaaggcttcctgccctttagtcagatgctttgagactgtgggcttctgccctcccggcccatgtctcccaccccaacggcactcttgcacattctgtttctctccctttctctccacctgaccatatctgagggcgaacttaattttcccagagggaattgcatttgagtccagtcaccttactgggaggccatatcctgtggttgagcagggaaattatttgtagcccttccaacatactgacagcggtggctgatttatcaggacctcttgcctgctaatttcatgcttcagtccaattcagctccttattgaactcttcctattttccagtagctgttagcagcctaaggacggagctaccaataagacacagtccccagccaaagagtgtcagaaaataatgacaatatgatggggtgatgctgttatagagctatttatttaccaagtactgcaaataccctgagaaggcattagttgatctgtctccctgggaagaaatcaggagggtttcagaggggaagtgtcatttgaaaagggtttttgaggggtgagtaggagcttactatgcaaagaagcagatgcacattccacattgagatcaagaacggtggacagttactttattcatttcttctttcctatctatacgatttgagctagttggaaggaagctgctcaaactttaatgcgtattttgttaaaatgcagattctgactcagtaggtctggggtggggccccaagagtttgcagttttgacaaggaaacaggtggcgcctatcagatgccctgtagccagccattggctacactttgagcagcaaagctttaacatatgaccttttaccaacactcactgtttgcctttacacgtgtggcccagattggatggagggccttgtcattccttgaagggtagcgaagggctggtcgtttgcaggaaggccctggcttgtcttcttccagaatgtggttattctcaggcccagcccagtgagtccagcacacctaccagattggagcagtgctgtcagagaaacccattttcaactctgtagcccgcccgtttggctcttcacccagaccttgcactacacggggtgatcacacatctgtgatttttaggaaaatcacagttgtaaaacgatggtcttttctaagaaggcaccctgtagtgtatattgagactcaatctttctataagcatacattcaaaaatcattttcttaagaaagggccttccatagttttgttcccagatgcccgcacagtcctgtaggaatgagggacttacatctgaattcctggtactctggggaggccttgtggcaaatgattggtttctcaagtgcgggccttttgtgaagttgatgggcttgctttgactcagccgatcttggccacatgtctttgagtcatatgaaacgtgccggtagcctcaggaacagcacagcccggagaggcggtggccagctgcccgtcagctgttctgggctaatttggggtttcagtgctggggtggagagagtgccgggaaatcctaacaggggagttcttggggcttgaggaaagccaggctgggaaggatggaacgtggacctctgcctcccacccctccatgaatcatggtgccaagtagaaatgcagagttgattctcccagggacagaattgcccagcaggggatgttggcgtttggtgtgtggctgtttctgctcatgtcccccgcttggcacacaagagactgcacttgaaaaccacccctagtccccagctcttgtgcccagcagccccttccccaaatgctttaccccctgttcaatattctgctggtcttttaagtctctctttctcatcctgagtctggaaatcacttgagggcagggactccacttagatcctcgcacctactcagtgcatggcatggaggggaggcagaatgaaaggatggacgtctgacctcttcctcctccgagaaatgccgtaagtgtgaggccagcggcccccgcggagtccgggtggacagcctctcctctgcatcctcccttcctggcaaggatgggagagagtaagtttgcagtctggcacacgctcaggactcgatcgtggggcaagatgtgatttttatggcaggaaagtgggagacacatgattagaactggctcttccagcggagaccctaagatcctgctcctgcccacagttgcagcaaccttcccttttggatttctaggtcgctggtagaataagttttccagaatggactgtctagagttcctttcttgccaagtgattcaacctgagggctctggggtttgattttttttgttttttgtttttttttttaacttttgagaagtgttgggaaaatgggctaaggagaatttctttaattgttctgggattgggagtcttcaaacttggattttaaagaattgctatagttggtcatacctcacatacattaatattaatattaatactaatattaatactaatgttaatgataattacttgaataaacactttgccagtcacaaagcccttttacacgatctttaatttttttttcattttctcaatagccttatgagtgccgcctccatgctacagataaggaaactgaggctcaggcagtagttcactcagatgtagttcagagagtgattaggtgggagggggatccaggccccaggactttgcatctggatcctgagttcctgggttctcctccctgcctctcagccagtgtttctgtgggccagggggcgcccactgtgaacagcttcctttcctgagggaccccggagaaggtgctcgctgcatagcagacctttctgagtcaggcccatgaggacttgtaggtcctcctctctgcgctgacatcattgtggctgcattgtgtggaaatgcggagggaggccagtctcaccgggagcttgggagtggccatggcccttcagagaagcccggatgaaggcatggggcctggcctttgcacatttgcactaagcagtcattgggtgtggtggcagctccttttggccaaaggcaatgcccagagaggagctcagctgtgagcatttggcaggcagctcttgggcagctagaggaatgggtactcagggggcaccacagcatccacagcgtcaaaaatggggaatgggcactgcttactgtcagtggtggaccacatttgttttgggaacagggaagttgctctctgtccctcaaatcataacattaggcaaactgcctaaccagcttctgtcttggctttgggactgacaggattcactaattggaaccaacctgacctgtgaggatgctaacctgtttttaaaaggaatcagtcttcattacttttatgtatgaacacagggtgacttgctgtgtgcccttggggaagtgactctccttctctgagttttactttcctcatctataaaatgaggataaggctactttgaaaactgtactctcctgggcgggctcgagcagtgattttgatggtcagcattgtcacatcctcacatggaagtaacattgtgaaatgtaaggacaatattttccatgcttttttctgttccaagtcctctgtaatcctgtgaagcctttctagccatcagaaaggggaatgctatggcctatacaagatacaataagtgcagaaagcaggttgaagtggaatccgtagtcgctcacctgctcagtaaccatcagtggctccctattgcccatacagtaaagtgggcagactctgtctggatttaagatcctcctgtctggttccaaaccatctttccaaactcttctcttgtgaaactccccttttcccttcttgcctcccgggaagtccctgagtgatcttggctgttctcaaccatgggcctttattcctgctgcctcagccctttgaaatatgctccatagtccctgctttgtgttccaaatagatctccccctgatggtagagctttgaagtgctgttcctggaaacttaacgactttgggtgactaggatattgacaaattaagaacagccaaatgtgcccttagtgttagtaacttgacatgagcaggttcagcttagagagggcccttcatcccctgaggacccacttgaggtcactcgtgtctgtggccaccaggtgggatcagaggcactggccagacttctcccacccagaccagcctcttggaggcggaaggattggtggctacttaggaattcattaactattttcttctttgttgttgatgtttctgtagttttttaaaaaataggataaaaaagttgaaagatccaaagagtaaagagtgagaccaatagcttaaatgaacagataagattgtgccaaataactgtatccaactaggcaaaacagtgtctttctgtgaacttcatccctgatgcttcctcctacctcattgcaaagctttatacacctatgtccttccctttgtggctggtaggttgtaaatattgacttttgcacgttgatttttgcctctttcattatttctaagacattctggttttagtcttgtgggcgaaccttccctttgtggctggtaggttgtaaatattgacttttgcacgttgatttttgcctctttcattatttctgagacattctgtttttagtcttgtgggtgaatttcaattttgttggtgaaatattccatcagagtttctaaacttaaattcatcttcttatccatccaaatcaaagcaaatttcttaacaaaatattttttgttaaaaccagtgaatttagtaatattgatcatttttctttcatttttcctcctttctattctttattattttaatactaagagttaaatttccattctttgctttctaaaaactctcttttgcaagaattttgttttctgtctatcgtagcttgctcttgttccaacaggtgcaccaattaattagactagtggttcttaaccttgagggtgcattagaattacaacattcctgagccctacctccagagggtaattctggggtggggcctgagaatgtgcatttccagcaagttcccatgtgatgtgtcgctctgggaggggggcctactttgagagccactcatgtagacttaccaacaaccaactgcctttcttcccttggtgcttgaagacttcgctgacaaacatctctgttctcttcatcagtggccacatctagattttgcacctcttgagcatccccagtgaagagtccttccctggatttagctctgaactctagagttatttgtcaaaaaattttgcagagcagacagaaggaagactagtggattttcccagccttcttgcagttgccttcacacacaaggaggtggctgaacagaattcttagttgttttccttgtgggtttctggagatgttgcctggccttgtctgtcatcaggagatgtctggttgttcagatttaaggccattgaaagaaggcagatttttatccccgtgcttggaagtacctagaattaggatttttttcttccctcttgaagtttcagtttgtgacaagcaatgtcttgaagctgatttctgatcattaactttgcctgcacctccatgagtcctcagtataatagcctttacagagtacttcagataacttccatgtcactttctttttcctgcatgagtcttattgtcatgctgaagcagtgctcttaggcacagcttcatggagatgctttcagttggtcagccatgaagatgtcatacagtttctcgctgccacgcctttgctggggccattccttctgcctggagcacatttcttccctgctctgcctggaaaaaccataggcatctttgggaatcagctcacatgccccgtttgtggggccagccatgactctcagagtggcacccccttccggtgcctacctaaaccacaagatgtctgcatcgtggtgtttctcattttatttgatttgcccggcacatggtcgtgatagcagccatcatttattgggcacccactgtgtaccaggcactctttaatccttgcagcagtccccagaggtttgggcactctccttatgcccatttaaagattaggaaaccgaagcttcttagggacttcaagtaactaggcgctggtgaggctagcatgcaaactaggtgtggcagcttttgggtactgtgcttgcagacactcgaagttgtaggcactcaacattcattgggtgagtgatgcatgaaaaggtggctgtgatggattcagcttctgctgagggaggtaggcagtgggaaagctgctggtgagagaaaggcagagacagttccaagcctgggctaagcctggtggggagggtttggaggacagcctgagggcatgtccaggacaaggagggagaaggaagacaaactttgcctctttagtacctcatcttgtgattcaggatgtagtacttggacaaggctgtcgctcaggaaatgatgtttaagtcagataggtctggaagtggctccagtgttaattaatgcccttttctcctttctcctgcccccaccccctcagcctcggccttcatcatcgtcatgctcctggccagcctcaacagctgctgcaacccctggatctacatgctgttcacgggccacctcttccacgaactcgtgcagcgcttcctgtgctgctccgccagctacctgaagggcagacgcctgggagagacgagtgccagcaaaaagagcaactcgtcctcctttgtcctgagccatcgcagctccagccagaggagctgctcccagccatccacggcgtgacccaccagccagggccagggctgcagcctgaggctcaggctgtgctggcataagtgctctgctcctaggtgatggcgtatgtttgtgtataaggtacctatcagtttgtatccctcccctccttggggtggcttcagtggggtggagagtggcctccatgatggaagatgataggggactcagccatcagacaacaccctggcctcctacacgtacttctaccaccctgaacccactgctgccctgggcagtgagtggcttgttttttctcctggacttgtaatttcactccagtatatttttacttcttcattctgggatattgtgaaaagcggtaaatataggattggtgaccaattgggtcaggaagtccagtgttctggacttggggtaagcagtggggttgggacctcagatgggaagggtggtgctaagatcctcctgacctcaaagtgtatttgcctttaagcgaacaaatgctggggtccttggggaccagcttgtcagagggtagccctaagagaaggggattaccttgtaagaccatctggcgcagtggacctattagaacttgggttaaaaatgtttaagaagctaatgtttaagaagcatttgggaaagaaaaagaaataaatgtatccagataggaaaagaagaagtaaaactatttgcagatgacacagttttgtatatagaaaatcctaaggaactcacacacacacacacacacacacacgcacacagctattagaactaataagcaagttccgcaaggtttcaagatacaagatcaatatacaaaaatgaattgtatttctttatactagcaacaaacaatatgaaaacgaagttaaataattccatttataataccatcagaaagaataaaataggaatcaacttaacaaaacaagtgcaagactgaaaactacaaaattggaaagaaattaaagaaggcttaaataaatggaaagacatcctgtgttcatggatcagacttagtattgttaagatggcaatactatcctaactgacatgcagattcagtgcaatccttatgaaaatcatagctggcttctttacagaaattgataagctagtcccaaaattcataaagaaatgcaagggacccagaatatccaaataagccttgaaaaagaacaaagttggtggattcacacttcctgatttcataatttacgataaaggtaatcagctcagtgtgttactggtttaaggatagacatacggagcagaataaagagtacagatatgaacacttatacttacggtcaattgatttttgacaaggttcccaagacaattcaatagagaaaggagagtcttttcaacaaatggcaccgagacaatgatatgcaagtgcaaaagaatgaggttggacctttactcacactatgtgcaaaaatcaactcaaaacgcatccaagatctaaatataagagctgaaactataaaatcttagaaagaaacataggcatagatctttgtaaccttgaattaggcagtggtttcttagatatgataccaaagacacaagcaaccaatggaaaaataggtaaattggacttaatcaagatttgaagcttttgtgattgaaaagaccctatcaagaaggtgaaaagataacctgcagaatgggagaaaatatttgcgagtcatatatatgataaggggcttgtatctggaatatataaataactcttataacacaacaataaggagaaaaataaatcaatttaaaaaatgggctaacggtttgaatagacatttctccaaagaagatatgcaaatggctactaagcacatgaaaaaatactcaacattattattcattagggaaatgcaagtcaaaatcacaatgagattccagtttacaatcactaggatggctacaataaaaagatggacaagaacgagtgtcggtgaggatgtagagaaactggtagaaatttaaattgttggtgggaatgtaaatggtgcacctgctttgaaaaacagtttggcagtacctcaaaaagttaaacgtagagtgaccatatgacccaggaatgccactcctaggtatttacccaagagaaatgaaaacgtacatacacacaaaaacttgtacaccaatgttcatagcaacattatttgtaatagccaaaaagtggaaacaacccaaatgtctaccaactgatgaatgggaaataaaatgtggtctgtccacgcaatggaacattattagactctaaaaagaaatgaagtactcacacatgccacaacatggatgagccttgaaaacttgctaagtgaaagaagccaggtgcaaaagcccacatattgtctgactgcattgaaatgcaatgtctaaaatggacgaatctatatagagtgaatatagattagcgtttgccagggcctggaggctgtgagagatgaggcatgactactaagggtttggggtttctttttcgggtgatgaaaatgttctgaaattagtggtgattgtgcacgattttgagaatgtactaaaaaccaatgaactttaaaaaataaaaataaacaaa

SEQ ID NO: 46 - DNA, 7809 bp, Homo sapiens
acaaggaggcaggcaagacagcaaggcatagagacaacatagagctaagtaaagccagtggaaatgaagagtcttccaatcctactgttgctgtgcgtggcagtttgctcagcctatccattggatggagctgcaaggggtgaggacaccagcatgaaccttgttcaggtaattaacactaactgacctggccaggtggggagcttccagagtaagctgaaaccattctgtgtgtcttaaaacccacatagaatgcttgagcttactgtgtaggaacagttcaagaatagagagttatagagtgttggaagtggaaaaggtctcattatcacaccatttgggcttctcctcttatgtaggaagaaacaaaggccagaaatattaggtgttttcttaagatcacacaacaccatagcagtagcagcactggggcttaaggcacatgagtaacaagtggagagtggatgaaccatatcttgctttggaacagcttcagttttttttttaatgcaacgtaattttagctaaatatttgtgttgctagtatcatattataaaatttgccattatttcagcaagctagagaaatactccaaatagattaagaagtgagcaactgcaaaaacttactataaatagatagctatagtaaaaattgtaagagtgacctaaaaactatacttattctgttagaaatatctagaaaactactacgacctcaaaaaagatgtgaaacagtttgttaggagaaaggacagtggtcctgttgttaaaaaaatccgagaaatgcagaagttccttggattggaggtgacggggaagctggactccgacactctggaggtgatgcgcaagcccaggtgtggagttcctgatgttggtcacttcagaacctttcctggcatcccgaagtggaggaaaacccaccttacatacaggtaatggttcagaggggttttcacataagattggaattttataaactatatcataggagaaaatagcatctgcttcaatttttctcctacaggattgtgaattatacaccagatttgccaaaagatgctgttgattctgctgttgagaaagctctgaaagtctgggaagaggtgactccactcacattctccaggctgtatgaaggagaggctgatataatgatctcttttgcagttagaggtaaaaaaaaaaaaaaaaaaaaaaaagcaaaacaaaacaaaacaaaaaacacatgaaatgtatccattcatctatctggtgttgttgtactggaaaaggctcaaaagggatccttgttacatatctttccaataaatttttttcctactagaacatggagacttttacccttttgatggacctggaaatgttttggcccatgcctatgcccctgggccagggattaatggagatgcccactttgatgatgatgaacaatggacaaaggatacaacaggttagttacacatctctcagaatgattttggcattaatttttttatatgtagaaatctgttaataaccaagaatgctcaagaaatgagatgttctggattttccagtggatcagagatcagcagaatatatttttgttttaattattattgaaaatattttcagatgctttaacagttttcctatattggtaagcacaatataggaaatatcattaagtatttctttaatgactggatctttgtgatctaggggtaaccattattaagaaaaatttctcatatcaaaatacaaacattcaagggatagtatattgcactgaatctacattaaaatgtgctctggatgttacttatgtaatttcctccatttacttctttactcttcaaaccagaaataagaattaaatttcagaaactgagattctcttttttttttttttctggctgaggcattattttagtacttttaggttaaaagaatttttatgggcttgttctgaaggaaaagactaactcccaaatacaacgttcaaactgtttaggtagaagaatgtttctcagttcataactgtatgttttggggaatgacatccaaagttttcaaaaaaatcagctaaaacaattaacactacttctaaaaaaataggaaaacaattaatactatgtctgaggtttaactgggatttataatgaaaatgtaaacctctgtaggacgtacaaatgtgagtttagtcctggatagaattcttgattggttgagttaacgaattcttgtaaagaaaccttcctgcaaactctcaaatgagattgttcctagcatcacaagttacacaagtaatactagcaaaagtaaggtagatttacttactatattgatcataattacccaatgcctcccaattttagcattatgggtgtttttaaaaatatgaaggaaaaaattttgaataaagccagtgtttatgtattctaaatctgttgtgtgacaaatgctagacatgattgggcatactgtgttttaaaccaattttgcaaatcctatgacatctatcattattcatgtttttagtctcaatatgtacttcatgatgatgaggctgagacattatcaattaacatgaatatagtttcctttaactgagactgcaaatggcaaatgtaaatatattaaaacagtgtttagctttgcattgacaaatgaaggtaaatatctgatatgctaagcaagtgggttcattccattcctgagtacaagaaaagggatctggttcttctggagttaatatgcttgtgaggctgggggtgggtttggggccatggggggcaagtggatgtaactgggaaatcaatctcaaagattgattacaggtatgagttttaaaatacacttagctttccattaagtgtgtaattagtcaattgttcaattaaccaacaaacaaggtgtaaaaagccctgtgtggttccaagaagtaaaaaccaatacaatgcacagcagacctgtgtaatgcacatgtatttaaaaaataagtaactattgttctcaatttcttaaatagggaccaatttatttctcgttgctgctcatgaaattggccactccctgggtctctttcactcagccaacactgaagctttgatgtacccactctatcactcactcacagacctgactcggttccgcctgtctcaagatgatataaatggcattcagtccctctatggtgagtgacactgggaaaatcagccattgtagttttgcaatgatggtcttcagaagagctttcaaatgctacataaagtatttatgatttagttcaaagcaccgtgagaatgtttggaaagcatacaaatgggcatatattgaaacgtatcacatttcccctaatgttccctttaggacctccccctgactcccctgagacccccctggtacccacggaacctgtccctccagaacctgggacgccagccaactgtgatcctgctttgtcctttgatgctgtcagcactctgaggggagaaatcctgatctttaaagacaggtcaggctgaaaaattatattttcctaccattttaatctacaatgtttagaaaggaaaacacgcagaaacttgatagagattcttagacatttaaaacaaaaacgtttcttctgagcttggaatcatttagatctggtgctgccttttcccacattttcctaaaattgtcaggttcatttttgaaggcacaggctgatctggttcttagcttctaattgctgtttccaaatgtcttaagtcacagttacttttcaaaaggcatgagtagatctttcgaataataattttatttttacttcctttaaaaatgacatcaggatcaacattacatttaatcaagtaatttacttactgatggatcaatatgcacatgacaaacattcaaagagcacaaatgagaagcaaattaaaaattttagttcccagttctccctgtactcatccagagtcaagactttttgtgcatccttccagaatctttctacacacatacaagaatatatttacacagcacatacacgtatacaaacacggcctagcttttggaagagggtatagcacacgcactgttttgcatacattgcaggtaattaaagcttatgctgggctaattcatttgcacgatagaataatttttctttcatagaagacattactctggaaacctatgacgggagactcactacagtcttctgaagaaaaaggaaagaaattttctaatggcaatatacctgatttctatctgtcatccagcctagaagatgagagaatgggggaagctgggtgaggcaagacggtgaggaaaatattctaaaggtgaaagattgtttttcaatttacatttctttttacatatattttaggcacttttggcgcaaatccctcaggaagcttgaacctgaattgcatttgatctcttcattttggccatctcttccttcaggcgtggatgccgcatatgaagttactagcaaggacctcgttttcatttttaaaggtaattactatatcatcatttgtttaacttgccaaagtaaaccctctcataagaaattgaacaacactttaattttccctactacaagttctggctaatacagtagtcaacggtaatgaagaaataaccagggctgatatcattgtatttatatttcatagatgataaaaataaagacaagaagataaattacccagagttgtaaattctctcatttgaccttagttcattcattcagtctgcaaatttttgtgaaaagcccactgtaagctggtgactaaatctaaaatttgggctactactttaccatgaaaatcaaagatgctaaagtgtatttctaaagcgaaagggcttaactgttataattcaatatgactctgaattatttatatttaacaggaaatcaattctgggctatcagaggaaatgaggtacgagctggatacccaagaggcatccacaccctaggtttccctccaaccgtgaggaaaatcgatgcagccatttctgataaggaaaagaacaaaacatatttctttgtagaggacaaatactggaggtgagatgcaagagaaatgactttgtatggagcctaattagggaaattagtttcttttactaaggaaatcccccaccccaaccttaggcctgcttctctcttagtaggaaggatgggacttcagacaactgtgggaaagttcttactttaaaacagcagcaccttaggctctcctgctttcagtcccaagtgcagttggctggtgcttcccttggtgctgtcaccccacctgcctggagccccctcttctctcctcaacctattcaaatcttgcccatccttcaagtcctggctcaagtctcatcacctccatgcagctttccctcgtggactttagacccattgggaaaatgttctgagaacccagaccgcaatttagcgttcccttcccattgtcttttagtttggctcactgtctcactgtgtgtttgtcactgtctcattgtgtgtttgttttgtcttcctaacactactatatgattttcaagggctacctctaacctcacccacttgtcacctctacctgataatgatggctcatttaagagatgatgatcaatagcagtccagtttatggatacaacccaacactcacagacaggttgattcctgggtcatttggccagactttgagacatcgaggccgaccatctgatatccagccaatgggctaaaaacacacttactgtgctttgcttcttatcctaatcccttttcccaggaggccaccagagaagatttagatgtgcaggggaggggacagcaggcatatatgggccaattgtggtagggaattaaaattgcattttagatgttgattcaattcactttatatatatgttcacactttcatgtctttgtgacagaaagatgattaaggttctttctgtccaggcttaagaaatatgatgacaaacagcatgtgctacatacagcaggatgcggcccctgttccggatggagatatggctttcagaactctttacagtaccattaaagtcacatatttctatagtcccaaatatgcttggcatttatttgcagtatttataaagtttagtaaaattccacattaaacctaacatgatctaagatgttcggtaacatggcctctatgcaatgctgagctgtttcttttacttggtacagatttgatgagaagagaaattccatggagccaggctttcccaagcaaatagctgaagactttccagggattgactcaaagattgatgctgtttttgaagaatttggtaagaggatacttactgtgttggccatagagcacttgaaacattttatgatatcagagggaagaggagcattgaaactttttaataacaagtgtttcttagggccagttcccttctcaaaattttgattcgcctacatttgtactcattatagaactacttcacaaaataacttgtttggaaccataaagataattacacaaatctcgctactttatcttatacatgcatataaaatcaaagtgctccagtgtcacttacatctcgagctaacatgtggagtcaagctcgactttcagattaccatgttagcataaaaatcccatcaagtggtgtggccaggtttaatgttggttagctggccttctcctccaccctatcttattgctgctactaattcccagggagattttttgtctgtctttcctgagttgtcagtcattgcccatgccagtcatttgcaaatacttacctttccatgtgcccaaagtttaaaaaaaaaaaaagattttgttttctactcaaggtaaggaagtggaggctgatgatctttattgaaaggtaacctgatcaccatgtttgcagagcactaaagggtcccctggtgttttgaaatagttgctgtgcttcctaggctgcaatgcagggaaaagggaggaggatttttggggaagaaagaaataggtgatgagagtttccaagcaagtggagaatttatctgatcggaagcagaataaccctgtaacctggaatctggctgtgttttcagacagagctggcaccgagtgctgtctccattcttccttgctgagtaaccttgaggaagcatcgaaatctgtctcaacctcaacttgctcaatctgtaaatggagttagacatacaacctcatagggttgttgcagaaataaatgaaaataaattcatgtaacaagcttggcatagtccctgacataaagtaaagctctataaacactttctatttttagttctctatgattctgagttttgtatattgtcaaatgtctttatttggaaaaatatcttactatttcccttgtctgtatttgcagggttcttttatttctttactggatcttcacagttggagtttgacccaaatgcaaagaaagtgacacacactttgaagagtaacagctggcttaattgttgaaagagatatgtagaaggcacaatatgggcactttaaatgaagctaataattcttcacctaagtctctgtgaattgaaatgttcgttttctcctgcctgtgctgtgactcgagtcacactcaagggaacttgagcgtgaatctgtatcttgccggtcatttttatgttattacagggcattcaaatgggctgctgcttagcttgcaccttgtcacatagagtgatctttcccaagagaaggggaagcactcgtgtgcaacagacaagtgactgtatctgtgtagactatttgcttatttaataaagacgatttgtcagttatttta

SEQ ID NO: 47 - DNA, 1955 bp, Homo sapiens
ctgagaggaactcctcactcagctagcttcaggagccatgacatcatctctaccatggaaattccactcactctcctgtgcccccacatttgtcctaggcctcagagtccctataaagagagattcccaactcagtatcagcacaggacacagctaggttctgaagcttctgagttctgcagcctcacctctgagaaaacctctttgccaccaataccatgaagctctgcgtgactgtcctgtctctcctcgtgctagtagctgccttctgctctctagcactctcagcaccaagtaagtctacttttgcagctgctatttcgagtcaaggtgtaggcagagtccttttttctagtcatggctggcaaacagtgggatctggggatgggacaaaaggcagctaggaagattgccatgtagtctgctgctaaatgtagagtctagtagatattcagtaacattcaagttcctattttcttaagaattagcaaccagcagaggaaaacgatgggctggaagtcagactgttgaattggctctgcctttaattatttgttcaagcaagcccctgtccctctctgtgccttggtttccccatctgtcatatgaagggagtgcgatgtgttctgagactgaatccagttccaatcttctagatttctttctcgttcttctctgaagatccactattcagaataagactcctgctcatgttaggtgggaatggatacaagggaccatatttggggttctggtagctccacagggatgctcaatgaagatgcaaaattagaagtcaaaataaacagctcccatgggcagtgttgatctcaccctggcctttcctttcagtgggctcagaccctcccaccgcctgctgcttttcttacaccgcgaggaagcttcctcgcaactttgtggtagattactatgagaccagcagcctctgctcccagccagctgtggtgtgagtatcaacccctggctgccctgggaggcaagggtgagggctggatttttaaagggggcctgttttggggagggggtgatgagcgttggggaggcagctctcagggctgaagccttccctgacagcagtgaggtcacaggtcatgaactcacttttcaagtgctgaaggcggctgagtggcagccgagacagaagggggttcctggggaggaagttattcagaggacagggaagcaggggaaggcagacaggtcccgtgagatatggaccaattccttaaaccatgctagaaaaacatgtggaaaagtcactaccaggctggcagggaatggggcaatctattcatactgattgcaatgcccactggttcctaatctgggcaacccctggggcccacagctaaatccagtgagtggaagttacagggagtctgcttccagtgctgctccgggaaggatcccatccaccagagctgccccacatggaccatggtcaggcagaggaagatgcctaccacaggcaagggataaagccagatgacctcaaaggtcccatgggattctaatctgtctgctccttgttctacggattccaaaccaaaagaggcaagcaagtctgcgctgaccccagtgagtcctgggtccaggagtacgtgtatgacctggaactgaactgagctgctcagagacaggaagtcttcagggaaggtcacctgagcctggatgcttctccatgagccgcatctcctccatactcaggactcctctccgcagttcctgtctcttctcttaatgtaatctcttttatgtgctgtattattgtattaggtgttatttccattatttatattagtttagccaaaggataagtgtcccctatggggatggtccactctcactctttctctgctgttgcaaatacatggataacaccgttaattccatgtgttttcataataaaactttaaaataaaatgcaaacagtt

SEQ ID NO: 48 - DNA, 8633 bp, Homo sapiens
aattgtcatacgacttgcagtgagcgtcaggagcacgtccaggaactcctcagcagcgcctccttcagctccacagccagacgccctcagacagcaaagcctacccccgcgccgcgccctgcccgccgctgcgatgctcgcccgcgccctgctgctgtgcgcggtcctggcgctcagccatacaggtgagtacctggcgccgcgcaccggggactccggttccacgcacccgggcagagtttccgctctgacctcctgggtctatcccagtactccgacttctctccgaatagagaagctacgtgacttgggaaagagcttggaccgctagagttcgaaagaactccgtggatattccagctttcccacaagcactgatcattatgagccagttacttaaccgatctgagacactctcacctcctaaatagggatagatgatactaatttgcaggttgtcattatgataagacaggatctgatcaatatatgtgaattgtttatatttggaacctttttattgagtggaagaagttgttttaaatattctagtcagttctttcctgctcccaggaaagcccggattatgttttaagataagcaaaatgtcttaaaagtaagctgttttactttgaatttttccctaaatgttgattagtgtactagatccattttaatttggaaagtgaagtgctacttatttgaacttcttaaaaatgctaattttaacatctaaagagttaactaagaaaagcttagtaacatgatgtaccaagttgaatatgctgttatccttatttagaatagaaaattggtatttctacgttttatccattctaaggcaggttaaaaaattgtatttccatgactacctatatatttcttgaatttattattgtaaagttgattcatagtcaaacaattaaatgtttaaattaagattaagacactagagaatgatttatttgctgtcctttaattgcagcaaatccttgctgttcccacccatgtcaaaaccgaggtgtatgtatgagtgtgggatttgaccagtataagtgcgattgtacccggacaggattctatggagaaaactgctcaacacgtaagtttgtcctttggttgcctcattaggagtggggctggatacagttatcattgtatagatttgtgtcttataatgagtcccattaatttctccctccctttcttcgtcttcttgcagcggaatttttgacaagaataaaattatttctgaaacccactccaaacacagtgcactacatacttacccacttcaagggattttggaacgttgtgaataacattcccttccttcgaaatgcaattatgagttatgtgttgacatgtaagtacaagtgtctttctaaggtttttagccttctcaaagaaaaatatgctttataatactgtaagcctaatctaaaaacatatttccaagcttatcaaaaagactttaagatagcttttaagtttgccttccatcttaatcgccaaaaatattgacatttagtcccatccagtttatacagtctgctcacaactctgtatacctcttctaacctttactgtttggtcagtttgtggaggtagcatggtccagctgtttattgaatgcccatgggccacagaattgttctgaacatgtagcacccattaaaataaatttggatttggatcagcaagaaaataactttccatgattctaaagtgggtgccatactcagccattcctttcataggcctcttggatagtgagcagatggctacctgaaaaatcaatattgccagattataatgtgcagagtatatgtattttattaaagatgtatttcaagtggccattagactataaagtgtagttgtttaaaaatagattttttttattttggagttacattcaacctcaggtgccactttccacattttacaataaaaataatggttgatttacttaacaaatgagaataaataaaacatttttttctttgaaaatttcagccagatcacatttgattgacagtccaccaacttacaatgctgactatggctacaaaagctgggaagccttctctaacctctcctattatactagagcccttcctcctgtgcctgatgattgcccgactcccttgggtgtcaaaggtgagtaagaagaatccattagagatgtattaactataagacgggctgcattgctgccaaaaaaaaaaattgaccttagactaccatttatttattaacaaaagcagtttttacttttagcatggttatctatgggtattttttaaagtatgagtctatataaactattatgtaaaagcaaatgagcgtcttggtataatgtcttaatattttcaaattatttctttagaaatgaaataattctaattaaaatagataaaatcattcagtaagaagttgttccaccatatcttagaactgttgtttatattatgatcctattcacaattgtaattctcatataaatgaagaattcttggtagattgacagtcaccatctcctttcttgaatacatagatggattcttaccttagctttctcatttttcaggtaaaaagcagcttcctgattcaaatgagattgtggaaaaattgcttctaagaagaaagttcatccctgatccccagggctcaaacatgatgtttgcattctttgcccagcacttcacgcatcagtttttcaagacagatcataagcgagggccagctttcaccaacgggctgggccatggggtaagatagagttaatatcttagagttagtaaaattataccaaatcatagtcaagggctaacattaaaggagatatacagatagatagatccaaataacttatccactttttttaaaaagaagtcttatctataaaaaccttaaaggaattttccatttacttcactggtctagtaaaattatacacacacacagacatgcacacacatatataaacattcacacacatacatatgtacaggtattgttatttgtaatttgacccttgtattttttagtttaaaatgttagtactgcaaaatgttatgtcctcaaaaacacattgtaccatgattatgccgctttcaatattgtaaagtgaggtttttgccgcattattattttttggatttcaatagcatagcttcaagttattcgtaagaattttttataaataatacatttttatacttttttataattaccatatcatcatagtgaagtatataatatatatgatataagctcaatatagtatattaattccgttaaacacaaagacatatcagtttgtagctttggtggataaacaaattaatttagcaattcatggctatgaaaaatgtatattttatttaaaaattttaaagaaagctaaatgatcaaattatttaatgatgaattatatgatagacactttatataagaaaaacttcaacagcaacaaattaaaattttttcatcattttctaggtggacttaaatcatatttacggtgaaactctggctagacagcgtaaactgcgccttttcaaggatggaaaaatgaaatatcaggtatgcttcctttgactattaagacttagttattaccgcttatacccatattttaaaatccctaaaaatgtgttccttaactttttaactgatgtttatttatttatttatttttttagataattgatggagagatgtatcctcccacagtcaaagatactcaggcagagatgatctaccctcctcaagtccctgagcatctacggtttgctgtggggcaggaggtctttggtctggtgcctggtctgatgatgtatgccacaatctggctgcgggaacacaacagagtatgcgatgtgcttaaacaggagcatcctgaatggggtgatgagcagttgttccagacaagcaggctaatactgataggtaaacaagaaaatgatttatataaaaccctcttccccagggaaaattagtgtgctatctttgttatgttttgagtaaatgacaagatgtggtaaatgaaaactcacacattctatatacattaaatatgtaagcatgactgataaaatagctatcttttgatactgacaaggaagaaaacagaaatgaaggaatagcaaattttaaaaattgcattccagttgcttgaaagcttgtgatcagatgcaataaatgtttttattatttattttgtgcaaataggagagactattaagattgtgattgaagattatgtgcaacacttgagtggctatcacttcaaactgaaatttgacccagaactacttttcaacaaacaattccagtaccaaaatcgtattgctgctgaatttaacaccctctatcactggcatccccttctgcctgacacctttcaaattcatgaccagaaatacaactatcaacagtttatctacaacaactctatattgctggaacatggaattacccagtttgttgaatcattcaccaggcaaattgctggcagggtaagcattattattgaaaaccaaaacaaaagactagtcagtaactttagaatttctgccacggaaattatttttcttaaacttactaaaagagtagttagttatattgctagtaaaattattttattgatataagaagcctaactttgtttgaaaagtctaaacttttagtctagtctacagttgtcagacaaatagcaaattgtacccctaccttaaaaatattttcaaaaagtatctataatcttataggaataaatattttaggcttgaatactagtgttatttttgaaatgtaaaaaggcaaattagttctaggctggtgtcccattgaattttaagcagagctcctgttgaaatgtaggtaagcatctttccagcaaataaaaattgtctccgctgggagtttcagttttacctgatttgtacctaaggcaagctgaatacaaacagtaaatatgcctaaaattcttgttttacaactaattttactttccacaggttgctggtggtaggaatgttccacccgcagtacagaaagtatcacaggcttccattgaccagagcaggcagatgaaataccagtcttttaatgagtaccgcaaacgctttatgctgaagccctatgaatcatttgaagaacttacaggtaagaaacagtttctaaacttcttcgttttttgtttgtttgtttgtttttgttgtttttggttttcttttcgagatggagccgccctctgtcacccaggctggagtgcagtggcgccatctcggctcactgcaacctccgcctcctgggttcaagcaattctcctgcctcaacttcctgagtagctgggactacaggctcacgtcgcacgcatggataattttttgtattttcagtatagacggggtttcaccgtgttagccaggctggtctcaaactcctgacctagtgatccgccggcttcggcctcccgaagtgctgggattacaggcgtgagccaccgcgcctggcccctaaacttcttaaaagaatcaggggtcaaatggaaacagagaagttggcagcaaattgagcaaaagaatcaaactgttttttattttgtgaagtttgacattggttgtatctctgtcttcatcgccttcacaggagaaaaggaaatgtctgcagagttggaagcactctatggtgacatcgatgctgtggagctgtatcctgcccttctggtagaaaagcctcggccagatgccatctttggtgaaaccatggtagaagttggagcaccattctccttgaaaggacttatgggtaatgttatatgttctcctgcctactggaagccaagcacttttggtggagaagtgggttttcaaatcatcaacactgcctcaattcagtctctcatctgcaataacgtgaagggctgtccctttacttcattcagtgttccagatccagagctcattaaaacagtcaccatcaatgcaagttcttcccgctccggactagatgatatcaatcccacagtactactaaaagaacgttcgactgaactgtagaagtctaatgatcatatttatttatttatatgaaccatgtctattaatttaattatttaataatatttatattaaactccttatgttacttaacatcttctgtaacagaagtcagtactcctgttgcggagaaaggagtcatacttgtgaagacttttatgtcactactctaaagattttgctgttgctgttaagtttggaaaacagtttttattctgttttataaaccagagagaaatgagttttgacgtctttttacttgaatttcaacttatattataagaacgaaagtaaagatgtttgaatacttaaacactgtcacaagatggcaaaatgctgaaagtttttacactgtcgatgtttccaatgcatcttccatgatgcattagaagtaactaatgtttgaaattttaaagtacttttggttatttttctgtcatcaaacaaaaacaggtatcagtgcattattaaatgaatatttaaattagacattaccagtaatttcatgtctactttttaaaatcagcaatgaaacaataatttgaaatttctaaattcatagggtagaatcacctgtaaaagcttgtttgatttcttaaagttattaaacttgtacatataccaaaaagaagctgtcttggatttaaatctgtaaaatcagtagaaattttactacaattgcttgttaaaatattttataagtgatgttcctttttcaccaagagtataaacctttttagtgtgactgttaaaacttccttttaaatcaaaatgccaaatttattaaggtggtggagccactgcagtgttatcttaaaataagaatattttgttgagatattccagaatttgtttatatggctggtaacatgtaaaatctatatcagcaaaagggtctacctttaaaataagcaataacaaagaagaaaaccaaattattgttcaaatttaggtttaaacttttgaagcaaacttttttttatccttgtgcactgcaggcctggtactcagattttgctatgaggttaatgaagtaccaagctgtgcttgaataatgatatgttttctcagattttctgttgtacagtttaatttagcagtccatatcacattgcaaaagtagcaatgacctcataaaatacctcttcaaaatgcttaaattcatttcacacattaattttatctcagtcttgaagccaattcagtaggtgcattggaatcaagcctggctacctgcatgctgttccttttcttttcttcttttagccattttgctaagagacacagtcttctcatcacttcgtttctcctattttgttttactagttttaagatcagagttcactttctttggactctgcctatattttcttacctgaacttttgcaagttttcaggtaaacctcagctcaggactgctatttagctcctcttaagaagattaaaagagaaaaaaaaaggcccttttaaaaatagtatacacttattttaagtgaaaagcagagaattttatttatagctaattttagctatctgtaaccaagatggatgcaaagaggctagtgcctcagagagaactgtacggggtttgtgactggaaaaagttacgttcccattctaattaatgccctttcttatttaaaaacaaaaccaaatgatatctaagtagttctcagcaataataataatgacgataatacttcttttccacatctcattgtcactgacatttaatggtactgtatattacttaatttattgaagattattatttatgtcttattaggacactatggttataaactgtgtttaagcctacaatcattgatttttttttgttatgtcacaatcagtatattttctttggggttacctctctgaatattatgtaaacaatccaaagaaatgattgtattaagatttgtgaataaatttttagaaatctgattggcatattgagatatttaaggttgaatgtttgtccttaggataggcctatgtgctagcccacaaagaatattgtctcattagcctgaatgtgccataagactgaccttttaaaatgttttgagggatctgtggatgcttcgttaatttgttcagccacaatttattgagaaaatattctgtgtcaagcactgtgggttttaatatttttaaatcaaacgctgattacagataatagtatttatataaataattgaaaaaaattttcttttgggaagagggagaaaatgaaataaatatcattaaagataactcaggagaatcttctttacaattttacgtttagaatgtttaaggttaagaaagaaatagtcaatatgcttgtataaaacactgttcactgttttttttaaaaaaaaaacttgatttgttattaacattgatctgctgacaaaacctgggaatttgggttgtgtatgcgaatgtttcagtgcctcagacaaatgtgtatttaacttatgtaaaagataagtctggaaataaatgtctgtttatttttgtactatttaaaaattgacagatcttttctgaagataaactttgattgtttctata

SEQ ID NO: 49 - DNA, 8242 bp, Homo sapiens
atattggagcagcaagaggctgggaagccatcacttaccttgcactgagaaagaagacaaaggccagtatgcacagctttcctccactgctgctgctgctgttctggggtgtggtgtctcacagcttcccagcgactctagaaacacaagagcaagatgtggacttagtccaggtaaatgctgcattgcatgtgacaataatgtaaatttttagtttgtatttttctgcagtaatgtaatagagttttttaaggataggtttcttataaagagattttttttttttttgctagaaacagcaccctccacccaaaatgtatctagccatgcatacgctctctttttccagttggaggtgagagtgaactaaaggaacaacatccaaacttgtctccacaaattgtagacttgtaacagtatgcaaatcttgctctacaaaaattgctctactatgaagttcttacttcacaataactaatagtagggacatttctactctgaaatttcatttctcaccaaaaataaggataaaagcaactgcgaaatctaaacacaaggtttaaaagcagttctctgttttggctaaaacttaatgccatcaatttttagaataatgagaaagatttcccatgcagtgtttcgataattttcttttgtcagaaatacctggaaaaatactacaacctgaagaatgatgggaggcaagttgaaaagcggagaaatagtggcccagtggttgaaaaattgaagcaaatgcaggaattctttgggctgaaagtgactgggaaaccagatgctgaaaccctgaaggtgatgaagcagcccagatgtggagtgcctgatgtggctcagtttgtcctcactgaggggaaccctcgctgggagcaaacacatctgacctacaggtaggcagactgagggccagagtgagagagctatttcccatgacagtggtaagaagtcatgtccaatgtgtctctattttgtttcattctaaggattgaaaattacacgccagatttgccaagagcagatgtggaccatgccattgagaaagccttccaactctggagtaatgtcacacctctgacattcaccaaggtctctgagggtcaagcagacatcatgatatcttttgtcaggggaggtaagttcttcttatagcaccttaacctcaccttgcccctagatctcgtagctttgcaactggaattgattgtttaagatgaatgttgattttatgggctcgaagagggaaactgcatcacagttgatggaagtctgttggcctcttaacaaagctaatgcttgcccttctggcttagcttacataagaaccacaaggaatctttgttgaattgtttctttcagatcatcgggacaactctccttttgatggacctggaggaaatcttgctcatgcttttcaaccaggcccaggtattggaggggatgctcattttgatgaagatgaaaggtggaccaacaatttcagaggtaagccaatcaaatttgcctctctcaattctcccaccccttcatgtttcattgtaatattggttgatttagttgaaagaatgcattcatagaagtatatatttttctattaccactcagaaaattagtgatacacttagaaaagtgaaagagcggtcttttctgctagctaacaacatcttagcagtgacaactaggccactctaaaatttttattaagaaaattgttgaaaactttgatgttttaattgtgggcatcaacattgaaactttttcattagaagaaaacagtgaaatttaacagcggtcataaacttatgtggaaattaaagaaaaggaaggctttttgtgttttccaaaatttccagcagtcaacatttatcagttttgtaaataagaaaaatattaaatattaggctgggcgcagtggctcatgcctgtaatcccagcactttgggaggccaaggcaggcagatcacaacgtcaggagtttgacaccagcctgaccaatatggtgaaaccctgtctcttctaaaaatataaaaattagacaggcatggtggcacacgtctgtaatctcagctactcaggaggctgaggcaggagaaccgcctgaacccaggaggcagaggttgcagtgagccaagatcatgccactgccctccagcctgggtgacagagcaagactccgtctcaagaaagaaaaaaagaaaaagaaaaatattaaatgttaatagaacattttgcttctgtgtgaaatagtacgtgtcatttaatcattgataatattgattaatctgtggtgcgctttcagtcagctgagtttgtcttttaattgtatcaatgtaatcatagagtttaggtttcaacatgtctcttcgttattaataaatgcatgccttctgccttcggaaaaaagatatacatgcatatatttcaaaagtcactgataaaatagtaacatgagtccttgtagttgtaaattatttattagttaaatgcctcaaaactgaatacctttcaaataattacaaattgatttattggcctttttagagtacaacttacatcgtgttgcagctcatgaactcggccattctcttggactctcccattctactgatatcggggctttgatgtaccctagctacaccttcagtggtgatgttcagctagctcaggatgacattgatggcatccaagccatatatggtgagtatggggaaaaacattacggacaagggcctggtggtctttatatgtatttcaaataaaacagccattagcgatatccttgaagaagctgtcttcattgtttatgtagttttctaatactaggcaaaactaactctaggtattttattttccttaggacgttcccaaaatcctgtccagcccatcggcccacaaaccccaaaagcgtgtgacagtaagctaacctttgatgctataactacgattcggggagaagtgatgttctttaaagacaggtaagatgtcagttcttctttgtgatctgcatttgtaataataacaacattcaccactatgattaactattatgcttcacatgttacttatttcatgctgatttacatctataatcacatggtagcaaccacatgcatttgtgcaacataatgtacttgtaacaactttgtttttctacatgtattaggtcaactgattctcagaaaatatagttgattttgaaaatcagtatgtatgatctttttttacagattagcaaagtaagtcagagagaaggaaagagatcttttgggggcatagagctcattggtagcagagcagttattggtcttctgttccctatttcaggtctcttttcattatgccactctttatggtgataagtatcattggactttcttaggagaaagtggtcctttccatagcaacatctcactgatgagggttgcatagccatcctttaattatctcccctgccatcctggaaaaatggccctcccaaagcctattaacttgaagggtctctgttgccccctggaggcccagagaagaagagaagagagggcaccaatgctgggaaagtccccaagaactgatgaaatccctcctgggacagataggggcagccacaacatggtgcttccctcttcaaagaagaatcctagaactccctctgcagcatgtggactcaaaaagttggggtcatctcacatgcaaggaggaggcctgctctctgtaccatagtgattcctaaaggatcaggcaaaataataacacactcttttggtgtgttattgcacaccgcatttggtgaatgatgcagtccacagaaagatcaacacatagaaattcagggtggcctgaaaggctcattctctgcagcctctcaagtgctgtggcactgttttactactctgtagtcgcatctctcctagaattcagggcactggctcataattctttctgccctctctttactttttaagtgtaaaagataaggctggaggtaaactatacagggtgtggttcaatgctgggacaagttaagaaaacacatggttttaaaggaaacctctcagtacaacaggacacacctatcaaaccaaatattactagatggaacaggaccaatttgaggatttgccagaattgaaaggacacagagatcatttaaatgtcgccatgtcgaggagacatgaaaggctagagatagagatagtaactgatttgcctaaggcatcacagccaggcagaggaaggactggacctagaagtcaggtttccgacagccaaggccgtaggcttccctgtggcctggaatctggagctcttctgtgtcagcccacataacagtctatgctgtgctgttaccctagtccctattaagctctataatccactttgtgtaaatactactaaccaagggacaacaaagggattggctgccagagcggagtttaaaaatcaaccttagcctcttaccagctgggtggccttagacacctcccttagtctccccaacctcaatttctcatcctcaaatactctcttgtagtgtccttgtgataaggtctgatgtaaggaatgggcctggtgtgttgtaagtaatcactaaataataggatattagagtcatggtccagttggtaatgtgcacagccgatccctaatggctcaccaaagctgactgttaaattttgaagaattttgcaagctagctgtgaaccatagccattattaaaaattaaattataggccaggtgcagtggctcacacttgtaatcgcagcactttgggaggcggaggcgggggaatcatttgagatcaggagttcaagaccagcctggccaatatggtgaaaccctgtctctactaaaagtacaaaaattagctgggcgtgttggcctgtacctgtaatcccagctactcaggaggctgaggcaggagaatccttgaatctgggaggcagaggttgctctgagccaagattgtaccactacactccagcctgggtgagagagtgagactctgtctcaaaaaagtaaataaataaaaaagagataaaacttaaattatataaacaaaattaaattacattaaaataaaaggtaataaaaataataaaaattcatcagtttgtcataatttttactgcatttttctacttatttatgttcttaaagttacttatgcctattttatttgtatgctatacaatggtgctccactgagactcttgaaattcatcataatgggagtatttcaagctagtgaaatcagcaaatgctataaaccaacccttctttggagagctgaatgttatacatttaccagcacaccactagtgccagcaacaagaaggagctggagctggatatctgccagagattaccagaaattagatggaaacttttcttgctttttttctaatcagattctacatgcgcacaaatcccttctacccggaagttgagctcaatttcatttctgttttctggccacaactgccaaatgggcttgaagctgcttacgaatttgccgacagagatgaagtccggtttttcaaaggtaatctttctaattatttttcactgctttaataaatcaatttttcattccctttggggctgagatataaggttactagctacattctctccagggacttttgaaaatctcagtctcaccaaccaaatcaatgaaagtccatcaacttaactaaacggtgcgtagcgcattttggagtcattttaaacaaaaggcaaatgactggagatagaacgttctggcctttttaatgaatctagatttacaaaaatattttctgcacaaactatgtatttaaaaccccctccatattcctgggagtactcaaagtaaaactcgagacactatgccacgcaccaatatttttgcaaacgtgtgtttaacgtagtacaatgagtaagacatttgactcagccatacactcaaggcaaagaattaaatgcaggtcagatgggccaaacgctttgaaacaggatttttagcctttaaattatgaaattaaatggatgttagagacagaaagtttcaaattcctttttcatgaggggtaaatagcacgtgtgtacagtaacagaaatcttggctttagtatatgagaccagctttatgtgatgaggggcttactgagtataaacacggaatctggacacagcattaattcaagtatttggaactatcttctagtcaaatgcagtgatttgaatccaggattgcaaacccttacaggttatgagtcactacagcacttcaccctttatgatacaaatggtttgaacttccacagtccatgagcaaacctggagaaccgaagtttatatcaccaaggtggcataactaactctttagtcatttgaacatctgactgtggaaagaagcccccaactccataaacaagtcattctcaaagcttgctgcagattagaatcaactaagaagcttccaaagatagacacatttaattggtctgggatagggtcctggcatcagtattttcaaaaatctccctagatgattctaatctgcagccagggtactgcactagcatgtgaaactaagaacttagctgaaaattcacttactgcctattgaagtcttaggcaagtgttttatcactctttcttgattggcagggaataagtactgggctgttcagggacagaatgtgctacacggataccccaaggacatctacagctcctttggcttccctagaactgtgaagcatatcgatgctgctctttctgaggaaaacactggaaaaacctacttctttgttgctaacaaatactggaggtaagtttaagtgcagagaatgttagggcctcagttctttctacataaaaagttctagaatagcccatttcaaagtgagtctcaaactgccttggccggcatcctttccttcagatggctggtgccaatctatcatctatttagtctattgaccaataatcatcacacaatgcctgcactgggaatccagagaatgtagggggatgaattttaaaaggatgtagaattgaggacattcatcttaacggagctactttggccaaaagttacttatcttccatagtatgttacctcgataggacatagcgtagaacctactggagaattcgatgctggatttcagaggggccttaaaggccttttagttcacccaacattccaccttatcccatccactccccatttcacaaatgatctataaaatgaaatattctggttaaattcctcattgtgtattttctgtaatgattttcagagtgcacatgtttagcaaaaggtctgacactcttaactcttttctgaccaggtatgatgaatataaacgatctatggatccaggttatcccaaaatgatagcacatgactttcctggaattggccacaaagttgatgcagttttcatgaaagatggtaagtgaatatacatgtatttcctccatttcattgccgtagcaataacatcattattgttagttggaacagcaaatgccaaaaatatctgtgctcacagatgaattggtttctcaagaattcaagttaaacctagaaactacttgtataatgtagtaagtctcttttgttttgtttctaggatttttctatttctttcatggaacaagacaatacaaatttgatcctaaaacgaagagaattttgactctccagaaagctaatagctggttcaactgcaggaaaaattgaacattactaatttgaatggaaaacacatggtgtgagtccaaagaaggtgttttcctgaagaactgtctattttctcagtcatttttaacctctagagtcactgatacacagaatataatcttatttatacctcagtttgcatatttttttactatttagaatgtagccctttttgtactgatataatttagttccacaaatggtgggtacaaaaagtcaagtttgtggcttatggattcatataggccagagttgcaaagatcttttccagagtatgcaactctgacgttgatcccagagagcagcttcagtgacaaacatatcctttcaagacagaaagagacaggagacatgagtctttgccggaggaaaagcagctcaagaacacatgtgcagtcactggtgtcaccctggataggcaagggataactcttctaacacaaaataagtgttttatgtttggaataaagtcaaccttgtttctactgtttta

SEQ ID NO: 50 - DNA, 22455 bp, Homo sapiens
agtcacatttcagccactgctctgagaatttgtgagcagcccctaacaggctgttacttcactacaactgacgatatgatcatcttaatttacttatttctcttgctatgggaagacactcaaggatggggattcaaggatggaatttttcataactccatatggcttggtaagaaccttcactcatgagcctcttgttgagaatgtcaattctttaaatcatggagaaggaaatttaaagcagtaactttttctattctgtacaaggctgatgttctcaaagaaaatgcttaggaaagatagcctttggaatacatacgcttttttttttttaagcgttcttgtcctctaaaatttaaaaatagcattttataaagtgaattgttcagtagaaaatagcagttaatatttatattcagtatgaaaatatatttttaaacttttcaaagcagatgtagtagtacagtgaggagtatttctttaaccaactagaaactccaatatagtcttctgtttttatgtcaatgcatttgcaatcagatttcagaatcctaacaggtaaattggagtctacgaaaattttataataattgcttcatggactctgagctatagtctatatcttagttttttcaaacattttgactattttgaccaagccagcttgcagtacagaaaaaagtgaaaaatgtttctccttctgaatgcattcttaccactttgattctttctgtttctactatccatataaatacttttctgacccttttgttagacaaggaaagtttcttttgttattttgttttgttaaatgtaaggaatgagacaggccaaacagtgaagataaacaatagatcaaaaaaggaaaatgcagaaaatccaaaacaccccttagattacagtatgctaaacaatgctttaattctcatgatacaaattgatattgctctatgttcattattgtgtttaatagtaaaaaaaaattgaatttcttggggaaaaatgcatagattcttgcatagaataaagaaataaagagaaggcgaaattaacctagattttgattttatgctttctaaacagcacagttgtagaatattttccctttcagcatgtttctctctggtaataactgcaaccatgcggatttcattaaaaagcctaatttgtaatgcacagccttgccgcctatttttttcagcttgagccagtgaactaatttcactgtgatccatttggccaagacgggatctgaaatttagtagaggaatgagcccatctctttattttagttgaatacagtcaaatataggaaatacactcatatttgtcaggattttttttaaatgtcataaagctagtaagaattaaatccaggcagataaactttgaaatattatcaaaccctctaataatcaagtaatttagagttgtcttttaaagtgttgtcatatgttacaaaaatataaacctggacaatagaagttttgccccagaggtagagagaagcaaattcaaacgtctattaatgtatgctacaaatctgagggtcaggataattgcaaattgcttcaatctggggcaaatttttgaccagccagcctagcacagatgtttatagttggttggatcaatataatctttttagaaaccatttaggaaggaaagatagttggattagaagggatacatctgttagcaactatcaagaacaggacactttaaatctagggtgtcccatcttttgccttccctgggccacattggaagaagaattgtcttgggcaactcataattttttttttttttttttttgaggcagagtctcgctctgttgcccacgctggagtgcagtggcaccatctcggctcactccaagctccgcctcccaggttcacgccattctcctgcctcagcctcccaagtagctgggactacaggcacccgccaccacgcctggctaattttttgtatttttagtagagacagagtttcaccatgttagccagggtggtctcaatctcctgacctcgtgatccgcccaccttggcctcccaaagtgctgggattataggcgtgagccaccgcacctggcccagggaactcataatgttttaagaaagtttacaaatttgtgttgggccacattcaaagccgtcctggcaggccgcaagttggacaagtttactttaaattctctaggttatggttccaatctggtaaaatgataaggttgaagtaaaggatccctaaggcttattttaactctggtatcatctaatttttaaaatagtacttaaaacaaaaacaaaccacagttaaggacaagaaattacaatcattttacatggatcatgagaataaaaaatgcacagataagcaattatttttattgttgaatctgaaaaagaagggaaaggaaggtgggatgcagtggttcacacctgtaatcctagcactgtgggagtctgaggtgggcagattgcttgaccccaggaattaaaaagaccagcctgggcaacatagagaaactctgtctctaccaaaaaaaacacaattaactgggtgtggtggtgcatgcctgtagtcctagctactcaggaggctgaagtggaaggatcacttgagcccaagaggcagacgttgcagtgagccgtgacctcaccactgcactcaagcctgggtgacagagtgagaccttgtctcagagaaaaaaaaagaaagaaaggaaaagtgacgtatcttgagttccttctatggtccagaagctatcattagtcccatttgacaaatgaggaaactgaggctcatctggttatacaactccatggtagaaacagcagtggaaccaaagtccatttctactgccgccactcactaaaaggagaaaacatttattaaacaaattttcagttttaataaatgactattgactagataaattaataaaatattattgcttctgaaaggtaaaattaggattcattgtacaaaggtccatcttaatagctcaaaattctgaattgagaaatatttttaataaaacaccttatttaaaattgtcaggtacatactccaagagttctctatttgttcatatggcaacatactgggaagtttggcgctattagaggaacaatgtggaatgttaatatttaataaattaaatcagaaattataacaaaaattttttgctatttctgttattatgttattactagacaagtttcagtaggtaccaaaagtttaagaaaaattactgagggtgggagaagggagaggaacagaggtactgggtttaattcctgggtgatgaaataatctgtacagcaaacccctgtgatgtgagtttacctatgtaacaaacctgcacatgtacccccgaatttaaaataaaagatttttaaaaaatgaaaaattacttggaggaaaacttaaaattattatttttttaaatctgttaatttttttgttttgttttggtttggtttttttgttttttgagatggagtctcactctgtcgcccaggctggggtgttgtggcatgatctctgctcactgcaactctgcctccctggttcaagcaattctcctgcctcagccttccaagtagctgggactacaggcgtgcaccaccacacccggctaatcttttgtatttttaatagagatggggtttcaccatgttggccaggctggtctggaacttctaacctcaggtgatccacccgcctcagcctcccaaagtgctggaattataggcatgagctaccatgcccggccaaatctccgttcattttttccgtatacatcacattttaattttgaaataaaatatgaagaaaatcagtttgagaaaactttgtatacattaaaataatttttacaaaatttgttttcaaatacaggtcttttaatctgtattcttaggaaatataatttttaacatttttaatgattaacaacaatctctattataatacgtaagtaagctaaacaggcctcctgtctctaccaaaagctttagtgttcctctatttcaagataaagaaattcaaaatattcactagtgtccaagttccttgaggatagaacctgacccacagcacctagcaaaataccccgtggtatgatgttcaaagtaactaaattgaaaactagcaaaagtttaatgaggctttgccgtatgaaggacactgggcagcaggcatctttcaatagagaaacaacttgactgatgttcctggtattctctgacctcgagcatcagattgactaaggtcctctgtgtgtgagtaatgggatttactatgtaatgtataagagcaggatccttggagttcagaaaaacaagcaccctctcttattgagctgtggcaatgtcaacttcagtttggggtggaaaacaaagaactatatttctaattctcctggattcatttcttggtgccaagaaatatgtatgtcctcactgcaaatggtcctaagggtggctgattgcacaggtcagaatacagagacttaaccataatgtcagactacatagaactattagagctaactacagagctaatgttatgactattgtcctgggaatcttttcacattgtttctatggtagaagggactccaaactcaaaacaatccatttaaacagtgatctattggaagacaactcatgtatgacttaacactgcctaaaatatgttgggaaaaatatgtgaactaaaaaagacaaatcagataaaaaattgaggcattaactggtagttaggtgtgtccagttttttctctgctgtgtttgaatctatttttcttttccctaatttagtatttgctttggatcccttcagatctttcctcagtttttatttgtcttactaaattcttttttttttttttttttttttttttttttgagacagagtctcactgtcgcccaggctggagtgcagtggcgcaatctcggctcactgcaagctccgcctcccgggttcatgtcattctcctgcctcagcctcccgagtagctgggactacaggtgcctgccaccacgcctggctaattttttgtatttttaatagagacagggtttcaccgtgttagccaggatggtctagatctcctgacctcgtgatccgcccgcctcggcctcccgaagtgttgggattataggcgtgagccaccacgcccggcctaaattcttaattatattgcattagtcattgccctcaattggatattttagcttatttttctacgtcattgtgagcctacataatggatccatcttcactagtttcttttgccttcacctccttttctttcccctattgcttacctttgcacgtttttatatagcttaaatccaacagaaagccaaaactttatcacctgtggatagtgttgcaatacaatgttgtattaaaaactttattttaggccggacacggagtctcacgtctgtaatcctaacactttgggaggccgaggcaggtggatcacttgaggtcaggagttcaagactagcctagccaacatgatgaaacctcgtctctactaaaaatacaaaaattagctgattgtggtggcacatgcctgtaatcccagctactcggaaggctgaggcaggagaatcgcttgaacccaggaggcggagattgcagtgagcccagattgcaccagcctgggcgacagagtgagactccgtctcacaaaataaaaatacaaaattaaaaaaaatgaaaactttatttcaggctatcgatcaaaaacacaatttaggccaggcccagtggctcatggctgtaatcccagcactttgggaggccgaggcgggtggatcacgaggtcaggagatcaagaccatcctggctaacacggtgaaaccctgtcgctactttaaaaaaaaaaaaaaaaattagccaggcgtgatggcgggcacctgtagtcccagctattcgggaggctgaggcaggagaatggtgtgaacccgggaggcggagcttgcagtgagctgagatcgcgccactgcactccagcctgggagacagagagactccgtctcaaaaaaacaaaacaaaacaaaaaccaaccaaccaaacaaacaaaaaaacataatttagcctaaagtttctgtttatggccccaaattcccctaaaattccccctcattcagatttttccccaaagtttcctaacagtgaaaacttagctacccaaggcagccaacccagaaagccctttggcaggaacaatagctgttgtaatcttccagctgaggccacagaatttcccctgttccgtaagaaggaacaacagtgcttttatgacatcatctgattttgcagaacgagcagccggtgtgtaccacagagaagcacggtctggcaaatacaagctcacctacgcagaagctaaggcggtgtgtgaatttgaaggcggccatctcgcaacttacaagcagctagaggcagccagaaaaattggtaactgatttcacaatgatttttcttcttttttatccttggaggaaaaaaatccatctttcctaagccctagtaagacttctttctccaacccccttctgatatatcactaagcccctaggacatttctgctctctgacttctcctatccatctgcctagagttggcagacagttcctagtaccaccaacttatgtggagtcttaacccagtgtgacctaataaaatacaagtcaaaagaaaatgaaaacctcattatttcaatattatttaaatttctcattaatttcaatgccattgctattctttttagtattgttctatctctttgacttctcagtatggtggctgttaaatgatgctatagtactatattgagtcttacaaggaaatttacttggtagagaaatattgaatttagtggcttttttccccaatttttttccattaagtgggagaatgtatttgtacttcaggatcaaaagctataaggaaaaggaggacaggaaggtcgtgagatagaagcagaaagaaactgggaagatggtatcagaagacctggtgaaaatcccagcaatcaactggtgttacatgcttctttatacaaaagtggattgctaccatctctcttggcctttggggagaatgggccacccccattcagaactcctttgctgactggataacatccggcaaagttgatacattactcaagaaaaaaaataagagtgttttctcaaatgccccaaagcctccccagatgactgctggtctgtaatcagggggcggcatggggcatagtaactggagtggaagagacaaagcccatagtctttactggccatcctggacctctagtaaaattgctcttggtggcattgacagatactaaaacagcctctgaggctgagcaaaggaaacagggctgagcctttgtttgaaatgtatgagagaatttatctttattcaaatcttctaaaacattatgaatatctgatagggtgcagtggttcacacctgtaatcccagcactttggactgcttgagctcaggagttcaagaccagcctaggcaacatagcgaaacctcatctctacaaaaaaaattaaaaaattagccaggtgtggtgatgcacacctgtggtcacagctactctaaagactgaggtgagaggattgcttgaacccaggaggtggaggctgcagtgagctgtgttcatgccactgcactctagcctggatgacagagcaagaccatgtctctaaataaataaataggccaggcgtggtggttcatgcctgtaatcctagcacttcggaagggtgaggtgggcagatcacttgaggtcaggggtttgagaccagtctggccaacatggagaaaccccatctctactaaaaatacaaaaattagctgggcatggtggtgcatgcctgtaagcccagctattcaggaggctgaggcaggagaattgcttgaacccaggaggcggaggttggagtgagccaagattgcaccaccccactccagcctgggtgacagagtgacactctgtctcaaaaaatagataaataagatattacaaatatcttaattgatcctaaaatagaaattaaattaccacttgaaaatattttttcaaaattgataatttcagaaattgtctcatggcattccatacgtcatttgtgaaaagaagccagctctgaacttggattagtttcatacccacaataatttgtagtccatttgcatttttttcaagtaagaggtagttttccaataaaaatcagaagttatatttcatgtgtattcacactttgtctaattaaggaagcaattttctcccttttacatgaactggatttgaccagttaagaaacttactattggaagtggctatctttgctaagatgacttttgcttagccaagacagtttacctgtttagtccataactctttttcttcttgcaggatttcatgtctgtgctgctggatggatggctaagggcagagttggataccccattgtgaagccagggcccaactgtggatttggaaaaactggcattattgattatggaatccgtctcaataggagtgaaagatgggatgcctattgctacaacccacacggtgtgttaaaaataataattttatgttttgcaaaaacagttccatgctgctaagaggttgttaaaaaagaaatggctactttttccagaaataattgattttggtaataataactactactaataactacaattcataaagtgcttatactatacccgacattgagttgtgttccttcgtctacactctaacttaatattcacaataattcttcaaggagctattgttatacctattttagaaatcaggaaattgaaacttagagaattaagtaaccccaaatcaggagtcaataatgattaggcagatgggactgagaattcagatcttctctgtgccagggaacttcccagccataaagaaaaagaaaataaaaaagcagattaaaaacttgtcacagtaaattagctaaaacaataaagtgatgctaccaaatggtaactattcaaaattgtccttttgatacaacggggaaaaggagacaaagtaaacaaataaattctttccttaatttctttttgtgtatatatgctagtacttccaaactaagcaactctaattctatggtttaacaattatatactgtatatactagctatcattataccatatatttttattcatattttttccatgtttgcttgcaactaggaaataatgagaaaattaactcataattactataaagaattattcttaggtcacgttcttggagaaaaagtaggctgttctttttgggtatatttccaccaggacaatgttacaaaatattacagtatgttacaaagtcttcctggcatttaggatcataaacatcctcagatgtgtcccatttggatttaccctataagaaattccataacacagtaggagagttacatagtgaggttttagtgtattattataaaatctattatttaattatattaacatttggagaatagtttctcatgtctgtaactaacctatatctcaaaattatgtgtagtccaagtagaaagatttttgcctacagctacaactagtcttaactgagacaaaataggaataaatacttaacagtgcatttatgtaactttaactttcaagtcactttgacatgctttaagcttatttagtcctatactatacagtactaatttagtcctatatttagttatgtcaacaatatgtatcttcctttcctccctccctctcttacattttcttaaatatatttatgcagaccactcttttttactcttaagagtaactcttcttttcaaatgtattctctgattcttctttcacttgataaactttaggatctctgagcttccactggataatttccatagattaaactctagagtcattgaagaagtgccaatgaaatggtcctttcagtatttcattgccctttcataagaatataatcctaaattataaattattataagttgctttcttttctcagagaggctgaatacactctgggaatacagaatcctgggagatttgtttttacccaattctcagtgcatttagctcgcttttggatttggtggtatgctgactatttaggatgtggttaacttgaaggagacttgaccgcctgaactagcactgggggaacagctcactgaaacatcactggaataaaaaaaaaaaataatggcttcacaaaaataaagcaatcattattgattaatcaatgtcaccaagttagagctgatattctaaataatagatgaggcagtaactagatataacataaaatatagatctaaataaatatagccaaataggcagccaaattagttcaatatttgaattttttctaatctattaatatatacaacaaagattggatgctatgggatggaacaactcgctcctaaagctggcaatgtacatccttatgcagacatacaaactatgtgttgtatattttattatacagtaagaatagcttatgggttgcataacatccttaaattattttctgtattttatccttagaataaccctgtgtgatagataatgggaaaggtatggctacatttattttaccaatgaagaaaatgaagtgtagagtagtcaccaagcttgaactagatccttgaccttcatttgttgctccccagcctttctatgctcctgttctgctttatttcatcaaagcagaacaggagcatagaaaggctggggagcatcttttttctagacattagacacttacctgatatggaattaaaattaaccagggcttcttcctagctttccctctaggtcatattgcaaaccactgattctgagacagcgtttttgttttgttttatatgtgtttgtttttcttatgacaatttataacatattgaaatctgttaaatgatgaatgacttggaaaaacaaacatgaatatctccatcaaatcttaaaatattaggattagggtattagtttaaaatcagtaaaggcagtatacagaataattataaattattccttttaagtggattagagtgactttaaagtctcttgcgatcatgaaattgtataatgattttccaagcagaatttatgggatccattattctaagtgcttgtggccctgaagacatatggtgacaccacagggcaaagtccctaccatcttgatagggctgtttgtaatataaatgtgtatatatttgtcaaaatacatagacataggccaggtgccatggctcacacctataatcccaacactttgggaagctgaggtgggtcgatcaccagaggtcaggagttcaagtccaacctggcccacatggcaagaccctatctctactaaaaatacaaaaattagccagacgtggtggctcatgcctgtaatcccagctactcagaaggctgaggcataagaatttcttgaacaattgcagaggctacagtgagccgagattgtgccactgcactccagcctgggcaacagagtgagactccatttcaaaaaacaacaacaacaaaaaataggcgtgtgcacaaaagacttgttatgttatgccttaaaagataaaataaaaatatttttaaaagtacaattaattacattacaattcttttaattttaaaatttatttttatttttattttttagagctggaggtctcactatgttgcccaggttggcctcaaactcctaggctcatgagattcttctgcctcagcctcccaattagctgggactaagggtgagcatcactacacctagccatttttttcttactatatttacttttttaaaattcatggctgggcacagtggctcatgtttataatctcagcactttcagaggcagaggcaggaggctcacttgaggtcaggagttcaataccagcctgggcaacattgcaagatccatttccacacaaaaaaaataaaaattaccagggctgggtggcacatgcctgtcatcccaactacttaggaggctgaagtgggaggattgcttgagccaaggagttcaaggctgcaataagctatgattgggtcaccgcactccagcctaggtgacagagcgagatcttgtctcaaaatataaaaataaaaataaattcacaaagagtccatgttcattttagagaatttagtaactattgatgaaaaaatacatttattctttagctaaaagcatacataatataccatagatgctgtatactaagacatttaacatttcataaaaagtaatagattgctaagaaatgtcatttttaacagggataatgtttttcctaatgctttggggtttttacgttttttttcttctcatttcagcaaaggagtgtggtggcgtctttacagatccaaagcaaatttttaaatctccaggcttcccaaatgagtacgaagataaccaaatctgctactggcacattagactcaagtatggtcagcgtattcacctgagttttttagattttgaccttgaagatgacccaggttgcttggctgattatgttgaaatatatgacagttacgatgatgtccatggctttgtgggaaggtacgtatgggtccccatacaggaagttaaatgaacgtccagtattttgtttgatgcttctttaattttccctcaactgtccctataatattgattttggaatagttctactctcctaaagcaccatatcatttttcaacaaagatttttcttagctggctgctacaacatacttattaaagcagtgagagtgccttttgattatggctaagttgtaagaactagttagtctattttataaacacctcaagatctgactacaacatacttattaaagtagtgagagctgccttttgattatggctaagttgtaagaaatagttagtctattttataaacacctcaagatctgactataacatacttattaaagtagtgagagctgcctttggattatggctaagttgtaagaactagttagtctatgttataaacacctcaagatctgactaacaataggaggaagaaagatatgtgagttgcaaaaattgttcaggtttttaagttctaatttcttacaaccttaaaaatgattatagggccgggcacggtgtctcacgcctgtaatccacaccactttgggaggccaaggtgggtggattacctgaggtcaggagttcaagaccagcctggccaacatggcaaaaccctgtttttactaaaaatacaaaaattagccgggcgtggtggcaggcgcctgtaatcccagctactcaggaggctgaggcaggagaatcacttgaacccgggaggtggaggttgcagtgagccaagactgcaccactgcactctagcctgggtgacagagcaagactctgtctcaaaaaaaaaaaaagattataaattcagtaattgttgcctttcttcttcctacaaagcattgtgctaagtattatggaagtaaggtaaataagcaaagtttaaccctttctctctttaatatttttcctttggcttttcaacatgctagaacacaaccttttccttcacactccaaatctttaatatactttgaattttgagtgtcttatgatatattgcaaattaaagagtgtacaattaggtattttatatattcaggtccccacctaataacccatattttagactatcaattatcaatagactatcagttttcaattctctattatacatgatagtaatttaatggggaaaaaattgtaatggggacaatttaaaaatgacaaactcaatccctttttatgttgattttgaatgtgtaatttaaatacaaagaaaaccaaaggcatttcttgcaaaaatgaagagttttttaagggaaaatattttttgttttgttttcttctttctacatctttttttctttttttttttcttttttttgagacggagtctcactctgtcaccaggctggagtgcagtggcacaatctcggctcactgcaacctctgcctcccatgttccagcaattctcctgccccagcatcccgagtagctgggattacaggcgcctaccactacacctggctaatttttgtatttttagtagaggtggggtttcaccatgttggccaggctggtctcaaactcctgacttcaggtgatccacccgcctcagccttctaaagtgctgggattacaggtgtgagccaccgcacctggccttgttttcttctttagctgacagactactgctatagagaaaagatagtttataaaaatagtttgatgaagacacaaagtagagttggggaattaagaacaaagtacaggcaggcacacctgtggtcccagctactttggaagctgaggcaggatgagcacttgagcccagtagttctgggctacagtgcgctatgctggtggggtgtccacactaagagcagcatcaatatgatgacctctcaggagtagggtaccaccaggttgcctaaggaggggtgaacctgcccaggtcagaaacaagcagattaaaactcccgtgctgagaattgggaaggagcctatgaataaacattgtatttcagcctgggcaatacagcaacatcctatcttatataaaataataaactactgtctttaggaggtttgaacaggctaatttgttatttcttggatttatattatataatttaccctttaggtaaatttagacttttcctctagaataaattacatatttagaaacctgtaaaacccttacctttttatatgtgtaaaagggttcctttcaagtcatgattcagataaaaatcaaatccttttacacctataaggtccaaaataatttttccagatttaaatcagtctatcctagaattcaaaatattaatatcaccaagcatatgcccattcttctacaactgtgaagaaaactttataaaattaattagaaataaatttttaaggctggacacagtggcttatgcccgtaatcctagcactttgggaggccgaggcagttggatcacctgaggtcaggagtttgcgaccagcctggccaacatggcaaaaccctgtgtctactaaaaatacaaaaattagtagggtgtggtggcacatacctgtaatcccagctactcgggagcctgaggcaggagaatcacttgaacccaggaggcagaggttgcagtgagctgagattgtgccattgtactccagcccgggctatagaccgagactccatctgaaaaaaaagaaagaaaattttaatttttccaaatagattcaaattatctgctgcacaaaattttctagttacacaaagtaaaaatgccacacatatctttcctttaaaatctcattggctgggtgcggtggctcacacctgtaatcccaacactttgagaagctgaggcgggaggatcacctgaagccaggagttcaagaccagcctggccaacatggtgaaaccccatctttactaaaagtacaaaaattagccaggtgtggtgcatgcctgtaatctcagttacttgggaggctgaggcaggagaatcgcttgaacccaggaggaagaggttgcggtgagccgagactgcgccactgcactccagcctgagcgacagagcaagactccatctaaataaaataaaataaaataaaatatcatcaatattgtaagaagattatttcaaataacaaactttgttttaactcctactctctcttacaaatccaggtaaaataacaatagaaattttaaaaattatggaacaatgagctattacttagaggcttaattatcagtaacagccactttactagctgtataatattcatttgtgtgacatctcttttctaaaaattccttttcagatactgtggagatgagcttccagatgacatcatcagtacaggtaaggttttaaattgaggaccaaaactatgatttgtttctttacagtgtccctgaaagtaaagggacactgttaaatagtaaatagtagttattattcactttttaaagttgaaagaaccaacaccagatgcagcttgctaggttgtaaaatgcaaaaaaaaaaaaaaaattaaagatttatgccaactgcttgcactaaaaaatgtataaactcttctttgctgaaaatgtaatgtatctgagagtcttgaatctgcaaatccacaaatattgctatagtttatgatttccataaatgtgctaataaaatggctgaaatttttcattgataaagggttgaagtcatttataaagtcattaaaaatctttgtcactaaaacaatcttacatcatattcattacatttttatcttagtacaatattctccagagaatgtttcaaataacaaagttctgtgagatttaaatagatgttacatgagaagagggctctaaggtcaaataaatttggaaaacgttgggttaaacaatatcaaacaggtttcttcactggaagacagcagggatcttttaatatgctaatcatgtgtagtaaatctgaaaagaccagatataataggtagtgctttccaaatattgcccacccccccattattttctgtgactttgttccaagaaatgtacctcaagaaatgccctgtagtcgcataaatttatctcaatatgcaatatcactctttaatttatcccatactgctattttctggctaaaaacttcctttcttacatgtattcagtattttattttatttccatcaccagcaccagcagctggcatttttaagtgctctattttctcccaagtcataaaactatcacagtacttctgcaactataaacaacaaaactacattgagttgcaatttctaagtactcagatactactagttaacttactcccacaccccagcctttcagtgactcaattctaatttattcgtcataactgtaacagatggaacttcctgctctgttatcgaatgattaatgcttaaaccttgttagttcattattctgttacaaactcccttaagaaagataacctattaaattaaaccgtttacttatctctcattcctttcttgaaaatatattttatattaacagaaagttgaaagaaaacatcttattgctgtaggaggtagttgggggatgagaatcctattaaacaaagaagttaaaaagaagcctaggccaggtgccgtggctcacgtctgtaatcccagcactttgggaggccaaggcaggccgatcacctgaggtcaggagttcgagaccagcctgaccaacatggagaaacaccgtctctaccagaaatacaaaattagccaggcgtggaggcacatgcctgtaatcccagctacttgggaggctgaggcaggagaattgcttgaacccgggaggcagaggttgtggtgagccaagatagcgccattgcactccagcctgagcaacaagagcaaaactccgtctcaaaaaaaaaaaaaaaaaaaaagtctgaaattttacattttccttttttctctaaagtagacaacttactccaaatgtaatcaaatcagtggtggggttttattggcacaacttcaagaaactgggaaaaaaaaaacccacacaatttatcattcaaagagaaacaaatcaagaaacagaaaagaatatagttaaaacaaaaaagccaaagatttagcaaaaaatcaggaagaggacattgatacaaagtaatagaaaaagaagatataagatacagttaacataaaatcctatcaagcataggcctggtgtggtggcttacgcctgtaatcccagcacattgggaggatgaggtgggcggatcaccaggtcaagagatcgagaccatcctggctaacacggtgaaactccgtctctactaaaaatacaaaaaattggccaggtgcagtggcacacgcctgtagtcccagccacttgggaggctgaggcaggagaatcgcttgaacctgggaggcagaggttgcagtgagctgagattgtgccactgcactccagcctgggtgacagagcaagaccccatctcaaaaaaaaaaaaaatcctatcaagcataatactattaacattttgatctggttttctttttaaatatacgcttactcaacccagggtatagattacaaaacaaaaatagaaaataaagacattggccaagcatggtagctcgtgcctataatcctagcactttgggaggccaaggtgagaggcgtgagcctcaggagtttgggaccagcctgggcaacatgatgcaaccctgtctctacaaaaaaatacagaagtcagccgggcacagtggctcatacctgtaattctagcattttgtgaggccaaggcgggtggatcacttaagatcaggagttcaagacagcctggccaatatggtgaaaccccatctttactaaaaacacaaaaaattagcccggtgtggtggcacgtgcctgtaatcccagttactcaggaggctgaggcaggaaaatcacttgaacctgagaggcagaggttgtagttagctgagatggctccactgcacgctagcctgggcaacaaagtaagattccctttcaaaaaaaatttaaaaatacaaagttagccaggcatcctgatgcgtacctgtagtcccagctactcgggaggctgaggtaggaggatcacctcagtccagggaggtcaaggctgtagtgagccatgatcatgccactgctctccagcctgggagacagagtgatattctgtctcaaaaaaaaaaaaaaaaaagaaagaaagaacctgaaattgtccataatcctaccacattaataagagatataaaagtaaggatgtgcctactctcctcacctctccatcccagaaaggcatttgataactctgtagtgaccatccttccagatgtttttctattatacaaacattatatatgtggaaactatggacatatttccatgtcagagtatgatatttagatcattcaaattctttttcatgactgcctaataggtcactgtatggatatactgtaatttgtcatgtactaatatttaacattctgaggcatttgattctgatttttttcttttgttattcaacgtttcaatgaacattttaaaacctctgtctttactcagtaattctactttaaaaaaaaatagattcctacagtgccaatttacatttctttttcttttcttttttttttttttttttttgttttttttgagacagggtcttgttctgtcacccaggctggagtgcaagggcgccatcacagctcactacagcctcaaactcctaggctcaagtgattttcccgcacaaggctaatttttattttttatttttagtagagatggggttttgctatgttgcctaggctggtcctgaagtcctgaattcaagctgtcctcctgcctcagcctcccaaagtgctgggatttcaggcataaaccaccttgcctggctgactcccaatttacattttcttttcttttcttttcttttctttttttttgagagtgagtctcgctctgtcgcccaggctggagtgcagtggcaggatctcggctcactgcaagctccgcctcccgggttcacgccattctcctgcctcagcctcccaagtagctgggactacaggcacccgccaccacgcctggctaattttttgtatttttagtagagacagggtttcactgtgttagccaggatgctctcaatcttctgacctcatgatccacccgcctcggcctcccaaagtgctaggattacaggcgtgagccaccgtgcccggccatttttgtgtttgtttgtttgtttgtttgtttgttttttaataaggcctgtcgactcatacctaaccaatttacattttaaccagctgaatattctctgaattctctcacaatagaagagcaaaaaagtatcattaataatctaagttgaatttttggtagtgtttttgaacacatttttaaatgtctattagccctttgaacacctatgaattgcctatgaatttatatttcttgcatattctttggcgcttttgtctttctcttttttatttctttgtatattagagatattaaccctattttctctcagtctgtctcgtgcaaaattttttttttatatttaggcaaatcttccaaatatgagaaaatagcagtctgagaatcagagcatgaactcggaaaccagactgcctgtgctcaaacctgactctgcccatttagttctgtggctttgggcaagctacttagtagtcactctgtgcctcagtttcttatctgtaaaatgaatatttaaaaagtatccccctcacctcgcagtgttgttgtgggggttaaatgagttaatagataaaagcaagcattaggaatgtatatactctgcttttgtttatatatatttgcagctcatgcctgtgaccccaacattttgggaagctggggtagaaggatcacttgagcacaggagcttgagaccagcctgggcaacatagtgagatcctgtctccaaaaacaaacaaaaagaaggcctttgcctcctttttgaaaaagatataaatattcctatattttatgttatataataaagtttttcctttttatttagcacattttggtctttatattacggtaaaatgtgtttaggtactctgtgtaaagtaggaatctagcttcatttctaataaatgtgaaacttgttgctctgacatcatttagtaaataactcatccacccatcgctggtttgacctgccctgccattctcctgtaattctgtggatgttccttctacaaagagtatcttcttttttttttttttgagacggagttttgctcttgttgcccaggctggagtgcaatggcagaatcttggctcactgcaacctccgcctcccgggttcaaggattctcctgcctcagcctcccgaggagctgggattacaggcacacgccaccaagcccggctgattttttgtatttttaatagagacggggattcaccatgttggtcaggctggtatggaactctcgacctcaggtgatctgcccacctcgacctcccaaagtgctgggattacaggcgtgacccaccaggcccagcccaagagtaccttttaaatacaagagagaggccaactcggtggctcacgcctgtaatcccaacacttgggaaggccgaggtgcgtggaccacctgaggtcgggagtttgagaccagcctggccaacatggtgaaaccccgtctctagtaaaaatacaaaaaaatctgccaggtgtggtggtgcgtgcctttaatcccagctactcgggaggctgaggcaggagaatcgcttgagcccgggaggcggaggttgcggtgagccgagatcgcgccacagcactccagcctgggcaacagagtgagtgagactccatctcaaaaataaataaataaatacaatagacaaaatttcctgtaggatagattggaggaccaaaggaaaaaatacaaacgtctctcaccctgttccatgcggcaatgaaaccacagactcttcagcttgagaatcgacctctgaattctgggaatcttgttcatgaattcttatattctcctatgagaatgaagagtctttgaattgtcagccaaatcaaaggagagtaacatctttgttcttttgcctccttccccgcaacaggaaatgtcatgaccttgaagtttctaagtgatgcttcagtgacagctggaggtttccaaatcaaatatgttgcaatggatcctgtatccaaatccagtcaaggaaaaaatacaagtactacttctactggaaataaaaactttttagctggaagatttagccacttataaaaaaaaaaaaaaggatgatcaaaacacacagtgtttatgttggaatcttttggaactcctttgatctcactgttattattaacatttatttattatttttctaaatgtgaaagcaatacataatttagggaaaattggaaaatataggaaactttaaacgagaaaatgaaacctctcataatcccactgcatagaaataacaagcgttaacattttcatatttttttctttcagtcatttttctatttgtggtatatgtatatatgtacctatatgtatttgcatttgaaattttggaatcctgctctatgtacagttttgtattatactttttaaatcttgaactttataaacattttctgaaatcattgattattctacaaaaacatgattttaaacagctgtaaaatattctatgatatgaatgttttatgcattatttaagcctgtctctattgttggaatttcaggtcattttcataaatattgttgcaataaatatccttgaacaca

SEQ ID NO: 51 - DNA, 3454 bp, Homo sapiens
gatttccggcctctcgcctgctcgccccgccgcccgcctgtcccgctccctccctcccggggacccggaggagaggggaccatgccggaacccgggccggacgctgccggcaccgccagcgcacagccccaaccgccgccgccccccccacccgctcccaaggagtccccgttctccatcaagaacctgctcaacggagaccaccaccggccgccccctaagcctcagccgcccccacggacgctcttcgcgccagcctcggctgccgccgccgccgccgctgccgctgccgcggcggccaagggggccctggagggcgccgcgggcttcgcgctctcgcaggtgggcgacctggctttccctcgctttgagatcccggcgcagaggtttgccctgcccgcgcactacctggagcgctccccagcctggtggtacccctacaccctgacccccgccggcggccacctcccgcgacctgaaggtaccgacctctctttgaactttcgttgtccccctgcgcgcccgccccgtccccgccccgcgctgcttccctccgcagttctgggaccccagcacccgcaaaccctctgctcggtcagtttttttcggcccctagcctgccctcgcgctgggttgcgctgcccgttaatccaatcccacttggtgagaaaagaagtggaattggagccccgggcacggtgcttcccgggaaaagtggcctcgggcgtgaatagggaggcttcggacggccggggcttgggacacggcctggaaggagggggtgattccaatgcgcctaagccgaaagggaaccgttctgccggcccctggcgaggaagctgagggaatggaaggaggtggccgcgctaccaccatctgcttgcctgtcctcgggaggagggggatcccaggactcggcgtcccttctctggcccagccgagaaggaggcagcccgcgggaatggtgaggcctcatggcctgggacctggaggccggcgcgggttgagcctgccgtccccaggcgccgggcctcgctcaaggctgtgtcggtgtgcatgtgtgtgcgtccgtctgtctgtctccccagcctcggagaaggccttgctgagagactcctcccccgcctccggcacagaccgcgactctccggagccactgctcaaggccgaccccgatcacaaggagctggactccaagagcccggacgagatcattctggaggagagcgactccgaggaaagcaaaaaggaaggcgaagcggcgccaggcgcggccggggcgagcgtaggggcggcggcggccactccgggcgcagaagactggaagaagggcgctgaaagtccagagaagaagccggcgtgccgcaagaagaagacgcgcacagtcttctcgcgcagccaggtcttccagctcgagtccaccttcgacatgaagcgctatctgagcagctcggagcgagccggcctggccgcgtccctgcacctcaccgagacgcaggtcaagatctggttccagaaccgccgcaacaagtggaagcggcagctggcggcggagctggaggcggccaacctgagccatgccgcggcgcagcgcatcgtgcgggtgcccatcctctaccacgagaactcggcggccgagggcgcggcggctgcagccgcgggggccccggtgccagtcagccagccgctgctcaccttcccgcaccccgtctactactcgcacccggtggtctcttccgtgccgctgctacggccggtctgaggccccagaggggtgggggagggagcgcccggcctccttgtccggaccccggaggagactgggccgggccgagggcgccgagaagtccagcggccttcaggaactggggcttgggcgcgcagcctctgcttcccctcccccagtcggtagcattttgtaagtatttgcaatgcattttcgtgcaattcatccctaatggattggaggcgcttcccctcttacttttggtttttggcttatattaagagaaagcaggaacaagacaaaattttcgggtcagagatttcggccgatagtttttgtaaaatgtgcagccctcccttccaaatttccattgcgcggtggctttttggttttatttttatagaaggaaaataagcgcaaaacctaaatccctctagtttattcttttctgcttttttttttttttccgagacggaatcttgctctatctattgcccaggctggagtgcagtggcgcgatctcggctcacttcgacctccgcctcccgggttcaagtgattctcctgtctcagcctcccgagtagctgggattgcaggtgtgtgccaccacgtccggctaatttttgtatttttagtagagacgcggtttcaccatgttggccaggctggtcttgagctcctgacctcgtgatccgcccgcctcggcctcccaaagtgctgggattacaggcgtgagccactgcgcccggcctagtttattccttttctatagaactgttttcagaatccagagagggagagaattcatatgatagtacttttatttctggatttctgggtatgtttcttcctcccaacccccaaatcagttatccaccttaattttcaaaatatgagcagcctctcataagaatcccgactcaggccgcttttctcttctggagaggtctgttgcaattagcctcttcatcggtcttactttgtgatggaagaattctctaagtgtctaaagagaaaagacagccaaaaatcagaactctgactatttgaaacagctccatatctggcctggtctaagtggtcttatttattagtagcatttattttgagaatttcatttgtaaattattattaatattactattattactttgttccctgttttgagagagtaatttcagtatttttaatatgatatcttttatcctctcctcttacttttcatgttctgcagtaattattgtacgttgacctgtgcaatattgtacaaaatctcctgagaaagctgtttcctcctccaccgtgggaaacagaccttttcactgtataatcatggtcattcatttagaaagaaaaaagtaggcaggggaaaggggggaagaaagaaacaagcttaggtagtgatgctcaaaggagtaagttaggcatactggagcgctttaagtgaaggacaatcaatttagcagaattttaacttatttgataaatgtacagatttcttgtaaagttcaccctctactccgcagggctcctggctctgtcacccaatctgttttctttctgtcggtacacctgttgttctgtgatagtttgtttcccctcatctccctcacctctgcctgggttgagtccctttttaagaaaaagagaaaaaaaaaacccacaaaatattgttacactaatgttgtcgtgacattgaattaattaaaaagaaaagaaaagcttta

SEQ ID NO: 52 - DNA, 6307 bp, Homo sapiens
atgaacctctgaaaactgccggcatctgaggtttcctccaaggccctctgaagtgcagcccataatgaaggtcttggcggcaggtaaatacacccgccccgcgccggcttcgcgtccccgctgcggggcgcggcggcaacttggggcgcttggcagcgcgagccggacgcccacccgccgcagacacacgaacacttggggcgcccgcgcagccaccggaggcgctgggtggcggcccggagcgagcgcgggcacatggtcccaagcaccgcacgccccgcggcaggttggcggcgagggagggggcgccgagccttcctcctcctcctcttcttccccctctccttctcctcctcctcctcctcgctccggacactcgctggctgctcttccctctgcgctttctcccagattcactctccctctctctttttcttttctttctttctttccgctttctcctttccaaccgcggtcccgggctgctcccagggaggggcgcgggcggcgagcagcttgcaaactccggcctgggacgggagcaggtgccgcctccatctgctggtgtctggaagcgtgtggtctgcgctaggtgagatataggggtgtggcccccctcccgcagccaccccggggcctcagcactgccttgggatgctgggacgaacaggggacccaggagaagtgaacttgaggaggcccctgtccccgctgttccagcatgggggatccgggggaggtctccagcctcactcgcccgctgaccccggcccccaccatcttcaggtgcccttctgcagagccctggaaaagcgtctaagggggcctggggggagtcgggagaacaggcccccctgggggaggggcaaaccaggacatgtcgggacagctcccagctctcctgtcacctttcactttccttcctccccgcccacccgactgcctatgaccttttgccttttctctctcctggtgcaccatttcctctccctccctgagccggtgtgtgtgtgttaggagggaggggaacccctgggacaagggacagcggatgagtcgggagaaggcatggagtcaggggctgtccggagctgggggaacagagagttttgaatgatgatttggggatggagagtggggacagccaggcagaaatggggtgagcttgagtgagataggggacactagggaaggaagagatagaggatgatgggggcgggggcagaattgggggcaattggcccagggagccagaatcaagtggcaggtttgggagggagatgagggtcaaccgaggactcctccccactcccccatgccccgtggcccccatgggtgcctggcttcggagatttgggctgcaatgggccagtgagtgggaagcgctgctgaggaacctgggccaccacgggaggtgggaagagaggggtctcctttctcctggtgcctgctgggcctggggcctggtgccttccagccagagggccagggggccttaggacctttgccttcctgagggaaagggtgggatggctgggagtctctcctggaccctgcaccctttgggtggaaatggcttgtgtcttgccctcatctttacgtcatcccagaagagagcagggagaactaaggtagagaaagggagacagagaaacacacgcagtgacagagtgaagactaggccccaggaagacagctgcaggtggtgagggggaaccaggagtcctctcccatgcggccattgttggacccccatccggtgtgccatgaccccaggccaccctttcctgcctttctactcatggcttcttcctgactgtccccaggagttgtgcccctgctgttggttctgcactggaaacatggggcggggagccccctccccatcacccctgtcaacgccacctgtgccatacgccacccatgtcacaacaacctcatgaaccagatcaggagccaactggcacagctcaatggcagtgccaatgccctctttattctctatgtaagttacccctgggatactgacaggagatggcagggagggggcttgtaaatatcattaggggctgtcctgatctgggttgaggggaccttttggggctggaaggagagaatggggagagggcttgattaaaccacccccagactcccgccacttcctgcccaagcttccccagggaagcttccccagggtgcccagttagcaaggggagaactgagtgcaaaggtggggacctggcacttcttatcttgtgattgtcctgctgcagggagcgagggatggaggggaaatgggcgtgaggcaccagggagatgcggttgagaggcagtgggctgtgggtgctgggcatggaggggcgtcccggaacattgtgagtgcagggatggaagtacttgtgtgtggtgccccagctagggctagacaccgagttttcccttctgtccccttagggtggtgatgatgatgatgatgataatgatgactgcgtgcatggctcagtctttgatctttagcaagggcactcacattacaattagttttggctctcatgacaattccagatgcttacagggcaaggagttgggtcctcatgcgctagatggggaaacagacgcaagagcttgcccaaagggttggcggcagggctgggacactgacccctgactcccacgtcacctcccttctgcccctcagtacacagcccagggggagccgttccccaacaacctggacaagctatgtggccccaacgtgacggacttcccgcccttccacgccaacggcacggagaaggccaagctggtggagctgtaccgcatagtcgtgtaccttggcacctccctgggcaacatcacccgggaccagaagatcctcaaccccagtgccctcagcctccacagcaagctcaacgccaccgccgacatcctgcgaggcctccttagcaacgtgctgtgccgcctgtgcagcaagtaccacgtgggccatgtggacgtgacctacggccctgacacctcgggtaaggatgtcttccagaagaagaagctgggctgtcaactcctggggaagtataagcagatcatcgccgtgttggcccaggccttctagcaggaggtcttgaagtgtgctgtgaaccgagggatctcaggagttgggtccagatgtgggggcctgtccaagggtggctggggcccagggcatcgctaaacccaaatgggggctgctggcagaccccgagggtgcctggccagtccactccactctgggctgggctgtgatgaagctgagcagagtggaaacttccatagggagggagctagaagaaggtgccccttcctctgggagattgtggactggggagcgtgggctggacttctgcctctacttgtccctttggccccttgctcactttgtgcagtgaacaaactacacaagtcatctacaagagccctgaccacagggtgagacagcagggcccaggggagtggaccagcccccagcaaattatcaccatctgtgcctttgctgccccttaggttgggacttaggtgggccagaggggctaggatcccaaaggactccttgtcccctagaagtttgatgagtggaagatagagaggggcctctgggatggaaggctgtcttcttttgaggatgatcagagaacttgggcataggaacaatctggcagaagtttccagaaggaggtcacttggcattcaggctcttggggaggcagagaagccaccttcaggcctgggaaggaagacactgggaggaggagaggcctggaaagctttggtaggttcttcgttctcttccccgtgatcttccctgcagcctgggatggccagggtctgatggctggacctgcagcaggggtttgtggaggtgggtagggcaggggcaggttgctaagtcaggtgcagaggttctgagggacccaggctcttcctctgggtaaaggtctgtaagaaggggctggggtagctcagagtagcagctcacatctgaggccctgggaggccttgtgaggtcacacagaggtacttgagggggactggaggccgtctctggtccccagggcaagggaacagcagaacttagggtcagggtctcagggaaccctgagctccaagcgtgctgtgcgtctgacctggcatgatttctatttattatgatatcctatttatattaacttattggtgctttcagtggccaagttaattcccctttccctggtccctactcaacaaaatatgatgatggctcccgacacaagcgccagggccagggcttagcagggcctggtctggaagtcgacaatgttacaagtggaataagccttacgggtgaagctcagagaagggtcggatctgagagaatggggaggcctgagtgggagtggggggccttgctccacccccccccatcccctactgtgacttgctttagggtgtcagggtccaggctgcaggggctgggccaatttgtggagaggccgggtgcctttctgtcttgattccagggggctggttcacactgttcttgggcgccccagcattgtgttgtgaggcgcactgttcctggcagatattgtgccccctggagcagtgggcaagacagtccttgtggcccaccctgtccttgtttctgtgtccccatgctgcctctgaaatagcgccctggaacaaccctgcccctgcacccagcatgctccgacacagcagggaagctcctcctgtggcccggacacccatagacggtgcggggggcctggctgggccagaccccaggaaggtggggtagactggggggatcagctgcccattgctcccaagaggaggagagggaggctgcagatgcctgggactcagaccaggaagctgtgggccctcctgctccacccccatcccactcccacccatgtctgggctcccaggcagggaacccgatctcttcctttgtgctggggccaggcgagtggagaaacgccctccagtctgagagcaggggagggaaggaggcagcagagttggggcagctgctcagagcagtgttctggcttcttctcaaaccctgagcgggctgccggcctccaagttcctccgacaagatgatggtactaattatggtacttttcactcactttgcacctttccctgtcgctctctaagcactttacctggatggcgcgtgggcagtgtgcaggcaggtcctgaggcctggggttggggtggagggtgcggcccggagttgtccatctgtccatcccaacagcaagacgaggatgtggctgttgagatgtgggccacactcacccttgtccaggatgcagggactgccttctccttcctgcttcatccggcttagcttggggctggctgcattcccccaggatgggcttcgagaaagacaaacttgtctggaaaccagagttgctgattccacccggggggcccggctgactcgcccatcacctcatctccctgtggacttgggagctctgtgccaggcccaccttgcggccctggctctgagtcgctctcccacccagcctggacttggccccatgggacccatcctcagtgctccctccagatcccgtccggcagcttggcgtccaccctgcacagcatcactgaatcacagagcctttgcgtgaaacagctctgccaggccgggagctgggtttctcttccctttttatctgctggtgtggaccacacctgggcctggccggaggaagagagagtttaccaagagagatgtctccgggcccttatttattatttaaacatttttttaaaaagcactgctagtttacttgtctctcctccccatcgtccccatcgtcctccttgtccctgacttggggcacttccaccctgacccagccagtccagctctgccttgccggctctccagagtagacatagtgtgtggggttggagctctggcacccggggaggtagcatttccctgcagatggtacagatgttcctgccttagagtcatctctagttccccacctcaatcccggcatccagccttcagtcccgcccacgtgctagctccgtgggcccaccgtgcggccttagaggtttccctccttcctttccactgaaaagcacatggccttgggtgacaaattcctctttgatgaatgtaccctgtggggatgtttcatactgacagattatttttatttattcaatgtcatatttaaaatatttattttttataccaaatgaatacttttttttttaagaaaaaaaagagaaatgaataaagaatctactcttg

SEQ ID NO: 53 - DNA, 20064 bp, Homo sapiens
ggcgcaacgctgagcagctggcgcgtcccgcgcggccccagttctgcgcagcttcccgaggctccgcaccagccgcgcttctgtccgcctgcaggtagggagcgttgttcctccgcgggtgcccacggcccagtatctctggctagctcgctgggcactttaggacggagggtctctacaccctttctttgggatggagagaggagaagggaaagggaacgcgatggtctagggggcagtagagccaattacctgttggggttaataagaacaggcaatgcatctggccttcctccaggcgcgattcagttttgctctaaaaataatttatacctctaaaaataaataagataggtagtataggataggtagtcattcttatgcgactgtgtgttcagaatatagctctgatgctaggctggaggtctggacacgggtccaagtccaccgccagctgcttgctagtaacatgacttgtgtaagttatcccagctgcagcatctaagtaagtctcttcctgcgctaagcaggtccaggatccctgaacggaatttatttgctctgtccattctgagaacccaaaggagtcctaaaagaggaatggaggagcctaagaataaaaatagtataataaaacatttcttagacacattgaccttggcctatgtcaaagttcagtctgggtttgtcttataacacaaggagtaaaagtaccattgttctacctctttttttaatacttgaaaaaaatttactgtggatgcttttctatgaattaaataaccttctaaaaaatgttttcattgctgcattcgattagattgggtaactaaatgaaattaattcctcactgttgggtataaaggttatttacagtggttctgtcttagccattcactgaactcattgcatatatatctctggaatattgctgattgtttccttcaagtaaacttagaagtgtaactacttagtcaaagagcctgaatattttaaaggccttttgaagaaaactgaaaatgctttccagaaaggatgtatcagttgacaatgacagtcgtcaacagtatttaaggagaactatgatactctgaagaaaaacttagcctttctcagtaaaagtaggtaggcagaggccacatgacagcagttagagtgtggtcttcaaggaagtcacagaaatactgtggggaattgaaaccccatgtggaaaatgtacaagagtgtctcagtgtgactgagaaggaggttgggcatggggtttcatggagtttaataaagtttggtcacttagtagaggtttaataaatcaactgtcttaatctttgatcctacttaagaattttttttttgtttttgtagagatggggctcttgttatgttgcccaggctgttctcgaactcctagcctcaggcgatcctccctcctcaggctccagaagtcctgggattactggcgggagccaccatgcaggcctcttgctcctacttttgagaaaggaagtttaaccggttttttttgtctttttttttttttttttgagacagagtctcactctgttgcccatgctggagtgcagtggtgcaatctcagctcactgcctcccgggttcaagtgattctcctgcctcagcctcccgagtagctgggactacaggcacctgccaccacgcccagctaatttttgtatttttagtagaaatggggtttcaccatattggccaggctgatctcgaactcctgacctcaggtgatccgcctgcctcggcctcccaaagtgctgggattacaggcatgagccactgctcctggctgcttaactttttctctatctcatcctcctacccatcctacccttggaagatagagaagtagtattagttccatagtgttatactgggcttcccccagggacaaacccacttccccaacctgaatgagccatcacttcttccccagtttacatttcattgctctttaaatgtctccattcggatatgggaattcacatatggtcataattcttacctgaagaagatgtcagtcttcttctcttagaccaactgccctgatatgaggtttagaggttaaagaacatgtgtgtatttacatgatctttgtattctgccttttcgtccctcactaatgacagctgcaccccaaggaaatggagctgtggaagagagggtttgataagaaattaagtaaatattggatctaatccatcaccctccaggaagcctttattactcctaaaaatttcaaccaaattcattaaaggacaagaactccaccagagtaggccataaacattggcaaaattagttgtaatccatgactagatttaatgtccctttgttttattcccatatggttataatgctttgcttggcattaggggtattttaagttttcttctgcctagtaagtgaatttgtgtttataatacaataatcataaaatatcacattaatattttataactgtacagttataaaatattttataagtaatatttatattttataagtaatattttataactgtacagttaactctggcccaaggaaaagatagtctgatagatgctgcagccccattttagcaaatgtgacctcacaggcctgaatgccatcgctattccacatctacaggatagacggaaaggaaagaaataaaaaaataggtacctaacactggcaagaggatgatgactcatgttatttcacttaacctttttatcttttaacatgaaggactcatacaggttgataagaaaccagtgacataaacagaccaaaaaatgatcagatctttcaaattagcaaaaaaataatattttttaaacaatgggtgaaaatacagtgtaacagtaccaattatcaacatgtgttgagaaccagaaaaatgttctttttctttgatcagcaacactatttgggaaaatctatcctcagggcctagcctggggccctggcacacagtaggcactcaacgaatatttgctgaacacacaaatacttatgatattttaaaaaattggcaacaatctgatacctaacaatagagggattaaatattatggaactgttaaataagatgcttatgaataccatgcagtaagatgggcaatatttatgccataagctttaatgaaacaaatgggtattaaatgtatgataaggttataaattactttttaaaagattacagggaaaaaaattgaaagatatacactgaaatgttttttgctcacagtggtgacaaggtttctcagcactggcactgttgacgttttaggctgtatgtctttgctgtgggaggctggcctgtgcactgcagggtgtttggcagcactcttggcctctgcccctagatagcaatagcagtcctccctcaaccagcccaattttgacaaccaaaaatgtttccaggcatcaccagatgctccctgggtgagagtgatgaaatagtaggggattttccccttcttttcttattttctgtaattccattatattactttaataataaagaaaaaaacataaaaaataaacgaatgttattattctacgtcagtttggatgtttggactccattttggggttctttccattatatcacttggtctgctaaacattctacggtttggtaaggtgaagtgattcatgaaattttggttttatttttttcctgatactaaaaataaaacattctttcacttggaaatttggacacagaacaccaaaaaaaatccataatctcatctctctttttctgtcttttccttccttttttccctttaaaaacaataaagagtgaaacctacctgttctccctctaatttaattcctaaatataatcactgtcaatatcttggacatttcctgtgtctaaacacacacacacacttttttttttcagcaaaagtggatttctgctacatgtagtgttctgcaacttactttctatgtgtttacaaaatcagtacatgtacatatgctgaattcagtccttaatggtattatattttgtgaatataccaaaatttgtttaaccacttagacaatctaggatattctcagtttgctgttatgagcaatgctcttcctttacatatacagacatatatatatatatgtgtgtgtgtgtgtttttgttttagtaggatagatttctaggagagggtgaaaggtcttatgacatccgcatttacgattgtaataggaagtatcaaagtgccccctaaagaaaaaaatcctcccattagtgggtaagaaagcctatttgttcatatcttcacaaacactaaatattagaaatatttacaattgtggtcaagctcataagtgaaaatggtatttcatatcttatattttttattgtgagattgaacatctttcatatgtttacatgtcacctgtatttcttattctctgaactatatgttatgacctttcactttttttcctcatgggttatgtgtagtttgtatagttgtcttattgattgttaggagctatttatatattaggaacattaatctcctgtcttatatatacgtggcatcgattagttgatcatttgtgagttcatgtctgtatacaaagattggagaggcactaagagggaaaacttacctctttcttatcaaagtttgtaaatatatgtataacagaagagggagaaaatattaataaatgcacagattggctgaaatagagtataaatcttttactcccctacttcaacataaactgcaaaaggagagtgacttttctttcactctgacttccgtattcctcatgcttaaaatagtgcctagcacagaagaggtgctcaatcagtgtttgctaaacgaaataattagtcacatttcaagcaggatgactaaatgaagaatagaatctaggcagatactctggaagagtggctgtgagtcattcatatcttagtatgaattagtcaaatccaactctctccccttcccactccccactgttagtagaagaatctgtttattgagagaatagatttataatttagaataagtgagaggggcagaagaggagattttgaaggatggcacctgaaggaggactagcatggctgagacagtgaagtggaagccttgaatagctaaagggtaagatgaaagtatttagctgtagggggaaaaagcattgacaggttggaaaagtaaaagtcagattctccttgctctgaaattttgtacagggcaggttctactaggtatgttacaatgcagaaaaaacatgaaataattgagaggaatttggtgcaatattatcttcttggcttcttttgagtgggcagatttttttcacggcctgtaactataataaatttgaaacttctcatcttttagtaacttttttcacttaagtttatgtggctgtgggcaatggaatgaagatattgaacttccaattccctgttgggtttccacaattacaagtcaatcatgactggttattagaagactatttcagttagaaccaccaagtcccatattgtcatattgtatgtttaattattaagtgaagcagtcttcttttcgtgttttccataattagggcattccagaaagatgaggatatttgctgtctttatattcatgacctactggcatttgctgaacggtaagacaccaaatccttccattaggttctatattttaaatattttaaccatgagtttaaaactaaaatgatcatttaaaatgcatgcaattttcttatagagagaacattctattctttcttctactttacacaatggcaaagtcttctttctactttacgcaatgataaagttacctgtgtcattttgtaaaaatatagagaatatagacaaattgaaagacacaaaataatctattacccatttcccagggttaactactgaaaatatctggggaaatggcctgtatgtatacatttatttgtttgctttcaacaaggccaagatcctttgatctttcagtcttggttgctctgtgacatgcctttcctgatgaggatactttaaggaagaattgtaagatacatggaaaatgtcaggctaacacagtactggcatcaccctgtgctctttcctgaactccataccaatgtacttcttgccagaaaactgatcaaaagtttagggaagtaaaaagagatgactgttagaatctaccattccctctatgtaggaagcaaataggtgtcctgtcaaaggacattctggggatgtctacatgaaaccaagtctccctggttgtaaggactccatctccatataatatttatacagtaatatatgtttataaattgtgggggcaacttgtttagctaattttattattctgctattgggacactgtgtctcagcatgagatatagtgtcccaaaacatatttcaagcccattggataaaatatgtgtttagcaagttcttaaatataatgataacataaccgaccagataaagtgatttataaacgctgtgccaattttgtaaatgtttcgaggaattttcccttttctgaagattgtccttctttctttttagcatttactgtcacggttcccaaggacctatatgtggtagagtatggtagcaatatgacaattgaatgcaaattcccagtagaaaaacaattagacctggctgcactaattgtctattgggaaatggaggataagaacattattcaatttgtgcatggagaggaagacctgaaggttcagcatagtagctacagacagagggcccggctgttgaaggaccagctctccctgggaaatgctgcacttcagatcacagatgtgaaattgcaggatgcaggggtgtaccgctgcatgatcagctatggtggtgccgactacaagcgaattactgtgaaagtcaatggtaagaattattatagatgagaggcctgatctttattgaaaacatattccaagtgttgaagacttttcattcttgtaagtccatacttattttcaaacagaacagcatagtctgttcattcattcattcaattcatgaattcattcacataattatccaatttcttgagcacctatttgatagtcactggaaatccagagacaaacaacacagagccatgttctacagtatgtacagttttccaaaaagaatttctagtctttacttttttattacaaatggaatacgtatacttgcaaataattcagatactgtggaagagatcaaatgaattgcaaaagtgtccctcctcccttcaccactatctcccatggcatgcagagagagtaaccattatttgtgtgtccctccagaaatttttttattcaactactatttttttattttattaggtccgtcagttttccttttttgagcctctctatatcaaatgcaaataaatatattcagaacaaaccccactgtaaggttcacattaaaaaagacttgaagtcaccctatgaagacaaaaaataatcacattaagtgtgaaagaacctattcttccagtacaggataagccatacttactgggcatatattcatcttgaaaatctatactgatgttgtcttggggaattgaaaaggaactaggagtgttagttcctcggtattgacccacagttatgttatcaggtcacttgagttcaaagttttgtgttggcactagctaagtaaaggaaaacacctctgctttcattgttgagtttcacagaattgagagctgaaaggatcccaggcaggagcagctaatccaaactcccacaaagaacaaaaatcccccagaggatcttctgttcttatatttcctgcaatggcgtccctgtcatatcccacaatggcctccctgccatttggatatcccttccatatcctgttgaaattactccctaatagtaagctgaaatctgcccctctagttgtagtcttgggattatttcatttacatgatgaccttttaatatttgactagaattaaatcatctccccttggtctttccattcctgggctaactaccatcaatctgagggctaacaatacaagtagaaaaagtatacatttgtcactgatcactgatcaattattaatcaatgatcactgataactataaactcaaaaacaaaatcatgtggggattaagagaaatgtatcagttttatgttgtatttctggtccctgatactggctcaggtaatgccactattgtcaagaagataccacttgtaaagtagatttaattttcattatattttaccatatgcttctccattcatgacatctcttgagatgttgtggtttatactttcagtttttctccagtccatccgcaaatatcaggcatctactgtgttccaagatattaaagaaatcatcatgacttagcctcatcaacagcattgctagatctgggatggaaaggaagagtataatcctggcagtcaggaagaaggcagcataaagtataagtttctgcttccaaaaaaggtctctcatcagcctgtagggagtgtgtagggaagggacagctgtccttgtagtagggaagggttttattcaggtcgtctgggctccataatatcccttgtgtatctgcagtctcctttgccatggatcaacacaataggaaatcttccggcactgatggtttttccaagggggagttcttcctggagcaaagcaaatgaccaaccaggtttgaggacctgatttgtttgacaattccattttgtattgtaaattacttaattggcattctactcccaatccatcttgtcatttgcatacagtggttttgggattgagttcagctataccaaaagtctgaaccttctgcacttagaacaaggcaaccaccaagcttcacttgcactgaggccgtgtctccaatggaaatgaggcagctggcttgcaggagcttcccaactcagggaagtagaactcctgagtcacctccatatgcaaatgatttcacagtaatgctgttgaacttcacttcccatcacagcaaatgtgtggtaacatagcttccccacaggagtttactcaccatggtattttaaaggtgaaacatttcaaaactgaaatttgaaagaatttagttttggattcactcaattatcactatcacttcgggtgttattgcacctttcttgtttgtgagtttaaatgccagactctcaggccactaactttcaattaaaagtgtttttctttaatcgctgaacctaacagcagggaaaacgaaatgttcattcagactttcagaaccttcaatgagattaggcagctgaaagatcaaagtgttgcatagttgtcccgataaagctatttggatcatatggaccaaatcgactgctgtcattccccaccaaccccatctctccccaaaattcccagccctgtttaagtgttctctgtagcatttatctctatctagtatattgtgtagcatatcatatcatacttttctgttttgtttattgtctctctcctcctagaatataaactccacaagcacaaagatttgggcctgttttataatattgttgcatccccagggcctgatatacagcagagtggtggtacgaaaagagcacacaaaaaaatatttgttgagtcaatgaatgaatgatttcctcaaataggattagcctaaaattttggaaacatgaacagatttggatatgtgaaaatttatttccagactgttcatcaggaactgttagcagcttctaaagggtacactggagcagcagtagtaaaaggaggaagaggagcagctctgctactgctactatcgagtactactacaattagcacttgcttattctgtgtgttaggccctgtactgaacactctgtctaaattagttcatttcctcctggaaatgactctagggggtaagtgcttcatcatgtaagatgagtatttttcacattttgttgtgtctgaaatctgagtgtgtctttcaatgatggaatctttgattccatgataagtggtattattcccattttaaggatgaggaaactgaggtccaaagaaattaagtaatttgcccaaattcacccagcctagaaaatgataaagctagttctaaacccaagcagattagctctgaagtctgggcccttaataaccactttttattgcctatatttgtacctctggtgtacgtatcaagttatatgttgacttcaaaactatcatgaccttttcttggttttgattgtccaacattagtatagtgttctgggtctgcaaaaattttgattactcatctcatctgtaaaacattttgaactcgtgtgtttgtgcatgcacatttgtgtgtaattataaaaattttactttctgttaatatataagttgtatcataagaaactgccgtttttgaagagcaaaaaaaggttgaatgttaccagttacatctggttcaacctaatagacatttgtacaaaaacagacattttaagaggttgaaataaaaatttaataaacaatattttcagtttttactaattgtgatgcttcactatcattagctaatatgtcaaggcataatataccttagggtgaactttatcattaacaaaggtggatggtgtcaataatcttgaggtttgtgtttttttatataacactgcgaggtctaattaagtacttactgtttaccacctcatacagtggccgataaaaagtgtcacttctgctgtttcctctgggttgtgcttgaattattagtattatcttcagtcctcagtttctttgtgggaaactttttaattagttgtttaattttgtaagatggttagtttagtcaaaattagataagagaatttgaaaatccgtagctaccccaaagcaacctacacataagaactattatttttgtgttttgaaatcataattttattgatttccagtgtttccactggtagtggtttcattgatataggagtatcaaaacatcactcattatttatttcagtttcatttgatcctagccgttttgtattaactctctgtgaagaaattacctcacaaatctattgctgtccttggtaaaggaatggagaattaaggctctagatcattagtggttacactatagtattagaagtaaaaaaaagattataccaacaaaataagaacatgttaatgtacttgtaatgaataaacatgaataaagctcttatgctatataggtgcactaaacaatctactagaattgtcagcaaactacgtatcttaatcctgaaagggtcccaaaccaatgatctaaaattgaatcaaactttcttccttgagcataattacttaaatgatttattaaaatagccagcatttaaaagcttaaaatgtaaatatcataatgtggtatcctagatagcatcccagaacagaaaaaggatattagggaaaaactggaggaatggaataaattatgcagtttagttattaataatgtactaacgtccttagttatgacgattgtaccatggtaatgtaagatactaacaatagaggaaaccgggtaaggagtatacagtaactctatactatctttgcaacttttttgtaaatttaaaacttctaaaataaagaacaaatttaaacattaaaaagtatcaccaggaacatatatcactgtttacagatgaaatactatgtattttcatatctaatttctgatcattgacttcaaatcagaaaagtgaatgacacctcaaaatcaggttttctgtttactgaagtctaagaaaagaaagcataccagctggagagattcatgtttataaagacagatttataacaacaaaaataaaatatccaagaataaatttaagaagaagcactttactgagaaacatatgaaaacctgaacaaatggagagggatattttgtatttgaatagaaagacttctggtttaaagataattctctttaaattattttttgtagaaatttaaggggtacaagagcagtgttgtcacatggatatattacatagtggtgaagtctggggttttagtgtaaattaatctttacattttgtttgagcccaataaatgtaccaacatgatttttatagaaagatagtcattcctattaatccaaacttgtcccaactttgaattgaattgaggcagagctagcaggtgttccccacggctgaggcatctgaacattaagcatatccctctgagaaccagcctgcattgatactctttctaatgtggacagcatcaagctatgtacgtagttctgtgctcagcaaaagccctgacttctttttgtttatgtcctagccccatacaacaaaatcaaccaaagaattttggttgtggatccagtcacctctgaacatgaactgacatgtcaggctgagggctaccccaaggccgaagtcatctggacaagcagtgaccatcaagtcctgagtggtaagaccaccaccaccaattccaagagagaggagaagcttttcaatgtgaccagcacactgagaatcaacacaacaactaatgagattttctactgcacttttaggagattagatcctgaggaaaaccatacagctgaattggtcatcccaggtaatattctgaatgtgtccattaaaatatgtctaacactgtcccctagcacctagcatgatgtctgcctatcatagtcattcagtgattgttgaataaatgaatgaatgaataacactatgtttacaaaatatatcctaattcctcacctccattcatccaaaccatattgttacttaataaacattcagcagatatttatggaatataccttttgttccatgcattgtagtactcattggatacacatagaataataagactcagttcacactcttcaggaaacagataaaaaactaagaaacaaacaaaaaacaggcaatccaacaccatgtgggaaatgctttcatagccgggaaacctggggaatacctgagaggaatactcaattcaggccttgtttcaggaatccaaatcctggcacatcagagctgcttccctctttccagggtggcaggaaataaatggaacatatttttctatcttatgccaaacatgagggaccctttctccccggtgcctctcccaaggtagtctacaatatttcaactctagcagtctgcttagtgcatagaacatgaggctgtgtgtccctgggcaaattactagacttctgtgtgcttcactttccctgtaggattataatctactgagcaagcttattgtaagggtcagattagcaacagtgtatgaaaatgatttgagaccattgcctgcacaaattcaactatttttttttatctcactactctacagaagtaggtagggtgggagacagagtctgatgagaggctcagaatgtgaaagaaagtgaggcgagtgagcatgatatttaatataaacacaaagatattctgagaagagctgctcactgccccctcccccaatacatgttgataggaaaatgccacgtacttcagcaaaaacaactgaaaaattagatagaaaagtcaatcaataggaaaagataatccaggacggtgttgtgaacagaaagagggggaaaaaactttagaaaatgatggggatgctcttactggggtacgagtcctcaggtattgaactggctttcagtaaaagctagattagtgggttcctgccatttacaagctgttttatgacaacttacttgttgggtggcctacagtaactcacctaactgcactgagtctgtttcctcatctgtaaattggggatttttttttaaatacctggcatgcctaactcataaagttgttctgaaactgaaataaaacatacgtgaacaggcattgtaaactgtaagttacggaaaaagctggctgttgttgtgtctttaaagtttcacctgggtagtcaaagatggatcatgggtctcagtggagagctgagccaggcaggagctgactaagggtgagaggtgggagttagcagcctctgaacatctgtgtaccatgggaccccctttcctcctgcatggtaccccagacaaggagcctagtaagagatactaatggcttgttgtccagagatgttcaaactgcagagaaagataagacaacaagcattggcctccaatcatgatgacagataggaggaggtgggagctccttagcagtgctggttggccttccatgttctactgtgggccatctctgccatgtactgtaggctactagcttctatattaaagaatgcaagaggggccaggagcggaggctcatgcctgtaatctcagcactttgggaggccaaggtgggcagatcacttgaggtcaggagtttgtgaccagcctggccaacatggtgaaactctgcctttactaaaaatataaaaattagctgggtgtggtggtgtgcacctgtaatcccagctactcgggagactgaggcacaagaattgcttgaacctgggaggcggaagttgcagtgagcccagattgcgccactgcactccaccctgggcaacagagaaagactctgcctcaaaaaaaaaaaaaaaaagcaagaggaagtgaaataatcaaggccgccatttaatagtgagcagccactccatgtggtactgtgcaagcacattataaatattagcctcacaagaaatgtattagcatttgtattttgtacactggttaagtatcttgcccaagacctcaaaactggttaagggcagcagaatttagccccagcaccaccttttcaaagcctgggcttctcacacttctccatgctgttcccattttaacacaggtatctcgccattccagccactcaaactttggcatttaagaaaattatcctaaagctaaactaaacttcaaggatgaccattctcctgaccccttcccatcaaaattttatctttagtcagtttgttttcgttttgttttgtttttcagaactacctctggcacatcctccaaatgaaaggactcacttggtaattctgggagccatcttattatgccttggtgtagcactgacattcatcttccgtttaagaaaaggtagtatttccttaattgcagtggtctccactgggggtgaggaaggggtgagaattggatcatggctgcaaggaaacccgacttaacctctgcaaggtggtgcaaaggcattccactgttcaacagcaattatattgaagctgagtgggatcactgggtgaagatgaagcgtaaggggtgaggggcaggagaatgggtatggatggaggtagaagatgcagtgtcatacagtttttttctatcatgaaaataaccacagacttacagaagagaaagagctaaaatgcccgtcattttcagttgcattttagtcttgcattagttgcaaccagctggtttctgggtaccctaagtaataaaaatagttcctctgtagaactgtagtatgtttaccatagagtattttgcaaaatttttggtagaggatgttacataatttgcatgtgttcatttctccatttacctgtgggaacaattaaaatccaggaaaatgagtatattcaaataatttcctcccatttaagatgagtcagagtaaataattcctccaatacttagagaagtataccaagagatccagtgatggtatagagttgtctgatgttaaatagggaagtagaatatggaaggggattccaatagtcgttgaaaaattccccataaccccttacatgggggaaagtagtgttaactgagagagtagagataagctgtttccaaaaattatattcttaacaggactgagatagccagaatataaggatcaagtttcaatgacagtaagatcctgagatggagttgatttgcacaaagaaataattgttgccagcatgcattttgaatatttctctggaaaaaaagattagttggcagtagaaatggatagaaatcaatagatattaaaatacctcagaatttggttcatctctgggaaaagatgaaaaataaaagtgtatactcctcaagaacatctaggatcaaaagcatgtgccctacactattgaattaattaacctcataagttgggacctgtggaataaggatgtccaccagacttcctagggattacaaatgtttcacagaacttgaaatttaaacttgggtcactgtatgggatgtagagctgtgctatatggaaataaaaatgatttctttttctcaagggagaatgatggatgtgaaaaaatgtggcatccaagatacaaactcaaagaagcaaagtggtaagaatatcagaaggaattgggaagtaaaagtcaaaggaaacaaaaagctaaagcaataacaaagagaaatccatcagtcataatctcctctccttttaaagaatgctggttcccctttgcctcacagctaacacaagaactcctccaccgtctgaggaggtttaggagcagggaaggggaaggagtcagcttcatttgctaatcttctgttgccctgcaccctagcagctccttgcagcaggggacaaggatgacttaggtggatggataattaattgattctaaaatattgtgtgtcagtattgtaatactatgttaattgcaccatgcacggtatctcatttaatcccccaccccttgccattaccaaagagagagagagagagagagagagaaatactagaatttatcctcattttacagtagagaaaacagagggtcaagaagataatgtaaagtgcccaagaacacacagctgatcacaaaaatcaagcttgggggccattagcctaaccacagacccttactcttaacccatctgcttcaatccattttgctacaaatgtttacatttataagcagggcagaaaaacctcatccaggttattgaactaagaagaaagttatattaaggtttctaatttttttaatgtagttagaaaccaaacttaacaatgagcccaagtttaaagcagtctaattaacctggacaagctcaggcaagtttcattctgtggcccatagcatcatctgtgttgtaaagctaagtagcaaatgttgtttgggtcatgctgggggacaagccatcccaatttgctcaggactgaggggttttccaggatatcatgtaaggataattgggtacaaatataacctgctgctttctctcatttcaaatttatcatttatcatatcagcaactatgagttatgttttttattagatttcttgttactttttccccagaccacttcccatgaaattaatatactattatcactctccagatacacatttggaggagacgtaatccagcattggaacttctgatcttcaagcagggattctcaacctgtggtttaggggttcatcggggctgagcgtgacaagaggaaggaatgggcccgtgggatgcaggcaatgtgggacttaaaaggcccaagcactgaaaatggaacctggcgaaagcagaggaggagaatgaagaaagatggagtcaaacagggagcctggagggagaccttgatactttcaaatgcctgaggggctcatcgacgcctgtgacagggagaaaggatacttctgaacaaggagcctccaagcaaatcatccattgctcatcctaggaagacgggttgagaatccctaatttgagggtcagttcctgcagaagtgccctttgcctccactcaatgcctcaatttgttttctgcatgactgagagtctcagtgttggaacgggacagtatttatgtatgagtttttcctatttattttgagtctgtgaggtcttcttgtcatgtgagtgtggttgtgaatgatttcttttgaagatatattgtagtagatgttacaattttgtcgccaaactaaacttgctgcttaatgatttgctcacatctagtaaaacatggagtatttgtaaggtgcttggtctcctctataactacaagtatacattggaagcataaagatcaaaccgttggttgcataggatgtcacctttatttaacccattaatactctggttgacctaatcttattctcagacctcaagtgtctgtgcagtatctgttccatttaaatatcagctttacaattatgtggtagcctacacacataatctcatttcatcgctgtaaccaccctgttgtgataaccactattattttacccatcgtacagctgaggaagcaaacagattaagtaacttgcccaaaccagtaaatagcagacctcagactgccacccactgtccttttataatacaatttacagctatattttactttaagcaattcttttattcaaaaaccatttattaagtgcccttgcaatatcaatcgctgtgccaggcattgaatctacagatgtgagcaagacaaagtacctgtcctcaaggagctcatagtataatgaggagattaacaagaaaatgtattattacaatttagtccagtgtcatagcataaggatgatgcgaggggaaaacccgagcagtgttgccaagaggaggaaataggccaatgtggtctgggacggttggatatacttaaacatcttaataatcagagtaattttcatttacaaagagaggtcggtacttaaaataaccctgaaaaataacactggaattccttttctagcattatatttattcctgatttgcctttgccatataatctaatgcttgtttatatagtgtctggtattgtttaacagttctgtcttttctatttaaatgccactaaattttaaattcatacctttccatgattcaaaattcaaaagatcccatgggagatggttggaaaatctccacttcatcctccaagccattcaagtttcctttccagaagcaactgctactgcctttcattcatatgttcttctaaagatagtctacatttggaaatgtatgttaaaagcacgtatttttaaaatttttttcctaaatagtaacacattgtatgtctgctgtgtactttgctatttttatttattttagtgtttcttatatagcagatggaatgaatttgaagttcccagggctgaggatccatgccttctttgtttctaagttatctttcccatagcttttcattatctttcatatgatccagtatatgttaaatatgtcctacatatacatttagacaaccaccatttgttaagtatttgctctaggacagagtttggatttgtttatgtttgctcaaaaggagacccatgggctctccagggtgcactgagtcaatctagtcctaaaaagcaatcttattattaactctgtatgacagaatcatgtctggaacttttgttttctgctttctgtcaagtataaacttcactttgatgctgtacttgcaaaatcacattttctttctggaaattccggcagtgtaccttgactgctagctaccctgtgccagaaaagcctcattcgttgtgcttgaacccttgaatgccaccagctgtcatcactacacagccctcctaagaggcttcctggaggtttcgagattcagatgccctgggagatcccagagtttcctttccctcttggccatattctggtgtcaatgacaaggagtaccttggctttgccacatgtcaaggctgaagaaacagtgtctccaacagagctccttgtgttatctgtttgtacatgtgcatttgtacagtaattggtgtgacagtgttctttgtgtgaattacaggcaagaattgtggctgagcaaggcacatagtctactcagtctattcctaagtcctaactcctccttgtggtgttggatttgtaaggcactttatcccttttgtctcatgtttcatcgtaaatggcataggcagagatgatacctaattctgcatttgattgtcactttttgtacctgcattaatttaataaaatattcttatttattttgttacttggtacaccagcatgtccattttcttgtttattttgtgtttaataaaatgttcagtttaacatcccagtggagaaagtt

SEQ ID NO: 54 - DNA, 701 bp, Homo sapiens
agtttactccaccgtgaacttcctccgatgtccataaatacactgtcacgttgtcacttttatgtctgcacagcggcgcattctaaacaagcaccacagtcttttttttaaacagcaatcccctgttgctggatcttaaggttttcttccactttttgaagaaattttcaaacagaacttgaagcaaattcttttgcatatctcagactatatgcctttaggatacattcccaagagggcatttcttgccaaagggaagcacacttttaaggttgttgatatcttcaattgttcatttcccgcagttggatacagagggggcagcagctgaaacctttttcaagactctagtctgcacattcgtggtaagtcctgaccccaggcccacgctgcgggggaggagggattgcacctggactaaatggtctgagcgacgcatgttagcatgaatgagctggctcattagttcatgttgcctccgccaccagcagcagataggacatacctcaaatgtgttgtggcagtatattacagtaaattatgacaattagatattgtacctttgtgggtgcaaagtcctactgtgatcaatgtaaacatggaaaaacaatgtaatttttatgatcctcatgtgggatttctccatgtttttactataagaggaactgcaggccgggcgcggtggctcacgcctgtaatcc

SEQ ID NO: 55 - DNA, 6119 bp, Homo sapiens
aggtaacaccatgtttggtaaataagtgttttggtgttgtgcaagggtctggtttcagcctgaagccatctcagagctgtctgggtctctggagactggagggacaacctagtctagagcccatttgcatgagaccaaggatcctcctgcaagagacaccatcctgagggaagagggcttctgaaccagcttgacccaataagaaattcttgggtgccgacgcggaagcagattcagagcctagagccgtgcctgcgtccgtagtttccttctagcttcttttgatttcaaatcaagacttacagggagagggagcgataaacacaaactctgcaagatgccacaaggtcctcctttgacatccccaacaaagaggtgagtagtattctccccctttctgccctgaaccaagtgggcttcagtaatttcagggctccaggagacctggggcccatgcaggtgccccagtgaaacagtggtgaagagactcagtggcaatggggagagcactggcagcacaaggcaaacctctggcacagagagcaaagtcctcactgggaggattcccaaggggtcacttgggagagggcagggcagcagccaacctcctctaagtgggctgaagcaggtgaagaaagtggcagaagccacgcggtggcaaaaaggagtcacacactccacctggagacgccttgaagtaactgcacgaaatttgaggatggccaggcagttctacaacagccgctcacagggagagccagaacacagaagaactcagatgactggtagtattaccttcttcataatcccaggcttggggggctgcgatggagtcagaggaaactcagttcagaacatctttggtttttacaaatacaaattaactggaacgctaaattctagcctgttaatctggtcactgaaaaaaaattttttttttttcaaaaaacatagctttagcttattttttttctctttgtaaaacttcgtgcatgacttcagctttactctttgtcaagacatgccaaagtgctgagtcactaataaaagaaaaaaagaaagtaaaggaagagtggttctgcttcttagcgctagcctcaatgacgacctaagctgcacttttccccctagttgtgtcttgccatgctaaaggacgtcacattgcacaatcttaataaggtttccaatcagccccacccgctctggccccaccctcaccctccaacaaagatttatcaaatgtgggattttcccatgagtctcaatattagagtctcaacccccaataaatataggactggagatgtctgaggctcattctgccctcgagcccaccgggaacgaaagagaagctctatctcccctccaggagcccagctatgaactccttctccacaagtaagtgcaggaaatccttagccctggaactgccagcggcggtcgagccctgtgtgagggaggggtgtgtggcccagggagggctggcgggcggccagcagcagaggcaggctcccagctgtgctgtcagctcacccctgcgctcgctcccctccggcacaggcgccttcggtccagttgccttctccctggggctgctcctggtgttgcctgctgccttccctgccccagtacccccaggagaagattccaaagatgtagccgccccacacagacagccactcacctcttcagaacgaattgacaaacaaattcggtacatcctcgacggcatctcagccctgagaaaggaggtgggtaggcttggcgatggggttgaagggcccggtgcgcatgcgttccccttgcccctgcgtgtggccgggggctgcctgcattaggaggtctttgctgggttctagagcactgtagatttgaggccaacggggccgactagactgacttctgtatttatcctttgctggtgtcaggaagttcctttcctttctggaaaatgcagaatgggtctgaaatccatgcccacctttggcatgagctgagggttattgcttctcagggcttccttttccctttccaaaaaattaggtctgtgaagctcctttttgtcccccgggctttggaaggactagaaaagtgccacctgaaaggcatgttcagcttctcagagcagttgcagtactttttggttatgtaaactcaatggctaggattcctcaaagccattccagctaagattcatacctcagagcccaccaaagtggcaaatcataaataggttaaagcatctccccactttcaatgcaaggtattttggtcctgtttggtagaaagaaaagaacacaggaggggagattgggagcccacactcgaattctggttctgccaaaccagccttgtgatcttgggtaaattccctaccacctctggactccatcagtaaaattgggcgtggactaggtgatctcatagatccttcctgctggaacattctatggcttgaattatattctcctaattattgtcaaaattgctgttattaagtatctactgtgtgccaggcactttaaataaatattgtgtctaatcttcaaaacaaatttgcaaggaaggtttttggagataaggaaactgagactcaggattaagtaacacacctaaagtcacaggtgagcttggaactgaacccaagtgtgcccccactccactggaatttgcttgccaggatgccaatgagttgtagcttcatttttcttagagactttcctggctgtggttgaacaatgaaaaggccctctagtggtgtttgttttagggacacttaggtgataacaattctggtattctttcccagacatgtaacaagagtaacatgtgtgaaagcagcaaagaggcactggcagaaaacaacctgaaccttccaaagatggctgaaaaagatggatgcttccaatctggattcaatgaggtaccaacttgtcgcactcacttttcactattccttaggcaaaacttctccctcttgcatgcagtgcctgtatacatatagatccaggcagcaacaaaaagtgggtaaatgtaaagaatgttatgtaaatttcatgaggaggccaacttcaagcttttttaaaggcagtttattcttggacaggtatggccagagatggtgccactgtggtgagattttaacaactgtcaaatgtttaaaactcccacaggtttaattagttcatcctgggaaaggtactctcagggccttttccctctctggctgcccctggcagggtccaggtctgccctccctccctgcccagctcattctccacagtgagataacctgcactgtcttctgattattttataaaaggaggttccagcccagcattaacaagggcaagagtgcaggaagaacatcaagggggacaatcagagaaggatccccattgccacattctagcatctgttgggctttggataaaactaattacatggggcctctgattgtccagttatttaaaatggtgctgtccaatgtcccaaaacatgctgcctaagaggtacttgaagttctctagaggagcagagggaaaagatgtcgaactgtggcaattttaacttttcaaattgattctatctcctggcgataaccaattttcccaccatctttcctcttaggagacttgcctggtgaaaatcatcactggtcttttggagtttgaggtatacctagagtacctccagaacagatttgagagtagtgaggaacaagccagagctgtgcagatgagtacaaaagtcctgatccagttcctgcagaaaaaggtgggtgtgtcctcattccctcaacttggtgtgggggaagacaggctcaaagacagtgtcctggacaactcagggatgcaatgccacttccaaaagagaaggctacacgtaaacaaaagagtctgagaaatagtttctgattgttattgttaaatctttttttgtttgtttggttggttggctctcttctgcaaaggacatcaataactgtattttaaactatatattaactgaggtggattttaacatcaatttttaatagtgcaagagatttaaaaccaaaggcgggggggcgggcagaaaaaagtgcatccaactccagccagtgatccacagaaacaaagaccaaggagcacaaaatgattttaagattttagtcattgccaagtgacattcttctcactgtggttgtttcaattctttttcctaccttttaccagagagttagttcagagaaatggtcagagactcaagggtggaaagaggtaccaaaggctttggccaccagtagctggctattcagacagcagggagtagacttgctggctagcatgtggaggagccaaagctcaataagaaggggcctagaatgaaacccttggtgctgatcctgcctctgccatttctacttaagccagggtttctcatatgttaacatgcatgggaattccctgggcatcttcttgtggtgtggagtctgacttagcaagcctcgggtgggtttgagggtcaaatttctaccaggcttatatccctggtgatgctgcagaattccaggaccacacttggaggtttaaggccttccacaagttacttatcccatatggtgggtctatggaaaggtgtttcccagtcctctttacaccaccggatcagtggtctttcaacagatcctaaagggatggtgagagggaaactggagaaaagtatcagatttagaggccactgaagaacccatattaaaatgcctttaagtatgggctcttcattcatatactaaatatgaactatgtgccaggcattatttcatatgacagaatacaaacaaataagatagtgatgctggtcaggcttggtggctcatgcctgtattccctaaactttgggagcctaaggtgagaactccttgaactcctaaggccaggagttcaagaccagcctggataacatagcaagaccccatctctacaaaaaaccaaaaccaaacaaacaaaaatgatagtggtgcttccctcaggatgcttgtggtctaatgggagacagaacagcaaagggatgattagaagttggttgctgtgagccaggcacagtgctgatataatcccagcgctatgggaggctgaggtgggtggatcatttgaggccaggagtttaagaccagcctggtcaacatggtaaaaccccatctctacttaaaaatacaaaaaagttagccaggcatggtggcatacacctgtaacccagctactcaggaggctgaggcacatgaatcacttgaacccaggaggcagaggttgctgtgcaccactgcactccagcctgggtgacagaacgagaccttgactcaaaaaaaaaaaaaagaagtttgttgctatggaagggtcctactcagagcaggcaccccagttaatctcattcaccccacatttcacatttgaacatcatcccatagcccagagcatccctccactgcaaaggatttattcaacatttaaacaatcctttttactttcattttccttcaggcaaagaatctagatgcaataaccacccctgacccaaccacaaatgccagcctgctgacgaagctgcaggcacagaaccagtggctgcaggacatgacaactcatctcattctgcgcagctttaaggagttcctgcagtccagcctgagggctcttcggcaaatgtagcatgggcacctcagattgttgttgttaatgggcattccttcttctggtcagaaacctgtccactgggcacagaacttatgttgttctctatggagaactaaaagtatgagcgttaggacactattttaattatttttaatttattaatatttaaatatgtgaagctgagttaatttatgtaagtcatatttatatttttaagaagtaccacttgaaacattttatgtattagttttgaaataataatggaaagtggctatgcagtttgaatatcctttgtttcagagccagatcatttcttggaaagtgtaggcttacctcaaataaatggctaacttatacatatttttaaagaaatatttatattgtatttatataatgtataaatggtttttataccaataaatggcattttaaaaaattcagcaa

SEQ ID NO: 56 - DNA, 28329 bp, Homo sapiens
ggagacgcaccggagcgctcgcccagccgccgcctccaagcccctgaggtttccggggaccacaatgaacaacttgctgtgctgcgcgctcgtggtaagtccctgggccagccgacgggtgcccggcgcctggggaggctgctgccacctggtctcccaacctcccagcggaccggcggggagaaggctccactcgctccctcccaggagaggcttggggttaggctggagcaggaaaccgctttcaagttatgccatgcttcccctagggtgtccttttacgctgcaaagttcctgctgactttatggaagacagcaagagagagacagacagcgagagagagggagagagagagagagagagaaacttgtttgaaagttttagtcattaaccttctgtcttcatctcagaatattaacgccctcatgtagtccatactatctttgcttaatgaacttgaacttttattattagtggcaaagaagtggtcccttagattcagagtaagttggaagaagacgttagtcttcttaaaaccattataattagaatatgacatgatagatttttctaatgtaaatattatgtgaaattttgaataattaggagaaaagatctctcacacacacacttcttaactgtgtaatgttttaataaaattttattgttaaaattatttcacttctcaacttcaatatactgtggagaatattggcagtatgttatgttctaaaacatatctaaagaattgaagttcactaaatagggctaaaaattgtgtttaaaatgttatttggaaaagaaaggaatctctgtgacttagctttttttttaagcttaggttttgatcaagttaataagatttgcatgtaggtttttctatgaccaatgacttattttctctatgacactagagtgtagagtacatcaagatatgaatcagacatttatgcaaggctaggaaaagccatatttaagccacatatgtgttttggatgtgtttgagtaaatgtttgaacttcaacctccaacccacaaataatgaatagaaggctaggtagtcttctacttagttcctaggatacagaaacataaataagtaaataaatagtaaagacactaaagaacaggtaagttggataggaatctacccataagtatgttaaaatatatatgtatgtatgtgtgtgtgtgtataacttcatcgctagagatactatggagtgcttttaaaaaagtaaacctttattaaaatataacacatagagaattgtgcaagtggtaagtgcctaatgcagtttttctaagtgagcacttgtgagctagcacacagatcaagaaatatattatcggcacctcaagagcttccatcactactgtgtctatggccagaacaatcagtattctgatttgaacaacatagatgaattttgcttgtatttgaacttcctataaatggaacttattcaattttttgcatttgacttctttcactgaaagttctgttgtgagattcatctctactgtaggatatagaataatttgtccgttgtcattgctgtatggtattccattgtatggacacaccacaattgatttaatcatcctagttttgggctagtataaataatgctgccgttaatatggggacatttttattcttcctagccctttttattttgtcaaagatttaattaataacaaacatactagcaatgagttaaatttcagggtttccactaaataatatatgtttctatttagaagtatccataaatttaaatagtaaaatatttttatatgtggtctgtacaggaagatagacaaacatgtagataatactaattttagatgatacagcattatcagaagataagacttcgtatatgtcttgaacacagtaaatactttatataggaagaattttgcttcccctttctttagcttctgagacttactttattttgaaaatgattgcaaatggacactttgtatttacacatagagtccagatgcccttttgtaaaaccaaggtgccactgtaggaactagaagcaccacagatatttatttctttataatgggcattccactggcactaggcatcaggacagtgtgaaaagcaagatagacactattcctttcaccatggacccatagtctaatggagaaagcagatattgggcaagtaattgtgtatatagagttgcaaagaaagaaactactgggtgacttgggaatataaaagattctgccatatagcaccttataagggaagctgctagtgcagtgttatcatgtggaccaaaaatcaaataccagtaccaccacttacctgagaaatgactgtggccaagttacttcttgagttttagttttgtcttctataaaatgataataatgatatgcatatatccaagatgcccacataaagtttctgcttcatatcaacactagctcctagcatgatgctcacagataactaactttaggacaatctagatccaagtgaattatgtaaacgaagtgctgatgatactcagaggagggagagatggccatctaccgtcatcctggaggaggggtatgacgtttcattgttggagatttaaaatcaggcatcttggaccaaagaagtgagagaaggcaagattgtgtagcaaaatagaattctagattctttttgtgagtgcaaagggtatgctggtaggcaagcagggaaggaggtagggatgggatgttgtcattagtactaatgtcatagacatgggctttcctggaatgttccttaatgcagttaagcagaggcctgctctgcttcactcaggcttaggttttaactgatggctgaaacttcccatcaagtagtatcggaaccatccattgaacttctcaaagctaagttctgaattaatgttatgatactaggagttggggtggagaagtgggcagggaggggtagatttatttttttctcaggaaaaatgtctggtctgtctgttttcctgtagaataatgcctttgggggctttttgttgttttattgttattttggtttcctctccctccccctagtggttaagtttttttttgtttgtttgtttgtttttttgttgttttgttttaagagaatgaatactctgaagtttctaggaaaatctgacataccctcaatccaaaacagtcctgatccctgtccgtagcaacgttcctggcccgggtcacctagcaacctccagcacaatttctaatttcaatctagtttcaaattttacttaagctgaaactacagctgtgaaattccactgattgaggaagtaagcgttctgcaccagatggtttatccggttagttctagaaggagagctatggcagtgctgatcaaaaggaactaaacacacactcaggtatttttgctctcctagccactaacttgcctgctgggttttgctcttggcaaccgtcagccccccactgctggcatgttccatttgtgtgaaagctttttgtaaaaagcattattttctctagcatctcattaaccgatagcatttcctttagtttgagtttctcctttgcagccaaaaaagaaaaagaaaaaaaaaaggctggggaatatattgaagggaaacagtgatcttacaaaaatttgtttgcattaaagccttgactgatgatgtctagctgctccttatgttgctacaatggagcagagatgccaaaattatcaggatatttgtatggtttaccctgtagggcagtagttctcaattatatcagatttctttcatgcacttttacaataaatcctttgaaacaacctccttgctctcctgaaatgaaattcagagtgcatatattttacctacacatataatttttaaaaatcaatatactgtcataactatattataaagaagtaataaaaagaaagtaatttataataaaataggcttcacttgaagacttaaagaagtagtgatatgctgacatctttttgtaaaattgccataaacacaccactaggaataaagactggggaacacgtgtaatattggtgactcaaaaacatggttagcattggctttggtgctatgattttctgaaatggtgaacaaatgttgctagagttttaaacagaacaaattttaataatcttctatcaaatttatcttgttaaattcctgaaaaattaagtttgtataacaattatgcaaaaagcactttgtgtgtgtatataaaatggagttctgatctagactcagataatagatttttttacttagatttcttatatcagtggtcaataggacatgaatgtgtgtgggacgtgggattattctttattgttcaggatgtccagcagcatacagtcattatgaccagagaaatgcccccacagattcctagaacttctcctaagggatagcaccacctctgtggcaaagtatgggctctttgcaagcgcagattttcatcttgttcatttgtagccccaagatctccataatgcatgacaataaggtgtgtttcctgagttaaaggagctataaagagatttgctagggtgttggatcgtctactggcaatttccatggatgttccaacagaatttagcttactgccactggcaatttccatggatgttccaacagaatttagcttactgccagatagttcacttctaatgttgactttgatctctttgaaaagatacacataacaccctacccacctgaccaatattttaaatacatttatatattcctactataaaggttcatatcaataccttcacaaaagcccattcttaagccagtaacaaaaatgtaccagattcatatattgatatttggagtgcaatctaagcctggctgtaccagttttctggccttcccatccagttgggactgtgtgctatctactgagtagagaatacaggtatacacagctactgagtggagaacaaatgatggtgggtttggacatcaagtgttcatttttggtttgataaattttatgtgtttgtaacatgtctcagagatgtcaagtaggcatttagatataaaatattttagagtgcaggagaagcctgggctggagatttttttaaaaaatgtgtctcaacagcctagagaagatttttggagccatagagatggatgacttcacaagccaagagagaagagtgtgaagccgcccccagagcacaattctgatatcgatagtctggtaaacaaaatgcaaatatgaacagcagtagcagccatgtttagaaaagaaaacaaaaatcaaaataaaacttagcaacccacaatagcaggaactagtgaatcggaaatcctaggaacatccgtaaactatctatgctagaagaaagagtgaggtatggccaacttgaaatagatacaaggacggtgtttttatgtgacatgtaattagtttttggaactcactaccacagaatattttggggtaactagcagagaaagtctaaaaaaagaatccttttagacagttgtaagggataagaatagtgttacaacacattagctaagaaactgagtggtacccactctctctcacatttacctggcctctctaaatgaacgttctgaggctagaacagtctacagacacactaaaatggttctttccatctacaagttggcataatttccgaggtgcttgagtagtttttttcaccccaatttctcagaagcacctgaatcagccacaccataaatggatagaggatgcaagaggaaatgaaatgtaattcctaaagcccttccaaaaaaagtaatgtgctgataatggctttgatttacctctttattgttgtgatttttaaaaaaattcacctctctagatttatagtcttaatacctattaaaatatttaatttccttgaagccatcttctttaaaaataaaatgaatagctttaagatttctactccaattcagactggaccttttctataatagcctcttcaataatcaccaataaaataggaaaataggtgtcaagatgaatttagattcaagacaagacagtgactcatctaagctttgtggctgcctttagtaaatccaattttcttctctggtctttgatccagaaacctcagttctcttgccatgtaatactactttcttgttccaaaaaaatgatttcttttattcttagaaatatgaatatcagcactctattccttaaaaaattctcctgaccatcaatttgcatcaatttcaccaccaccaccatcaccaaaaaatgtaatttaacaattcagttgtgggtcatggtgacaatacttttgcaatggcagtggtgagaggcaagagtttctcattctgagacacattcttcttgtctttagccaacatgcatagaagttatgaatgtgtgtatttttcatatttcacttagttaaaagccaggttccaaagttctcagttgtatttagtctctgagctccaatgggtgacaccatttctatgggtcttacttccagcatctctaaaatagaggttagaataggtcatatgtggaaggtctgatgcagtttaaagattttgccatctgaattaaacacacacacaattgtgcattatttcccgctcaaaacatgcaaatatcaaacagacttgtctataaaaaacattataggaatgttttaaaatattctattttgttgcctttgtcaaagtttattctgccccattggttcatgtataagaaattctatttaaatcagtgagaccacaagatgaagcagcttttgaaatgttacctacctttagatagtaggtagtatgacttatatattttagagtcaaaaattattcttttaagccaaaaaagattttctcattctgagacacattctccttgtctttagccaatatgcatagaagttatgaatgtgcatatttttcatatcccatttagttaaaagccaggttcaagacatcccctcaggacttactgaagagatataattatggtcacttgcagtctccttagatgcattgagtggaattttctttgaatttgtattcacaaggaagtacttgacaactgcacaccattatttggaatacacgtcaaaccttcaggcagaataagcatgataatgggtaggttggcatgaccattaacaactacacttgaataatacaccaggctgatagacagagacctctgcacccacgctctgtttcctgtctcttcttttaatatccagtaaaaaatgtaaaaaaaagaaaaaaaaactagattgtgctaaaataaatgccaatagaaagcatgagcaatgtttatgaggatgatgtacttgtttgtgctctttgccagttgttcccagttcttctgccttccagaagcttggtgggattgtgtatcctagcctcctggtgaggatggggtcggggagaatgtgaatagttctggccagtaactcatgagttaaaatgatgtaagtcacttacaaattagagcacttaatagttgatgtatacagccctcccaaagttgtttgttttttcccttttcctccttgacagcaaatcagcaatatttcaggtattggttgctatatcatcctaggtcccggacagaggacaatggtaagagtcttcagcagaccaactagggacttgactatgtctgagaaataaacctgtgctgtttttaagccagttagatggttgaagttgtttattggcatgacataagacccaaccagccttgacttattcagtagccaaatcccagttatatctgatcattgagggtaagcaactgcaaagaacatttacaaaccccaaaagactaaatctgtgattttagattcttcaactccttcttcatcaaagctattgttagaaggattcatgaagaaggatctcttctgtcttctgctgctgaaacttcgaaaattcaaaatttagattacataaagggttagctgggctgcagagtgggaaggtcaacaggcaccagtagactccaaatcaaacaccctattatgtgacagtaaccaaacagggatcatgcttttcattgcttccagttgacccttcgtttgtagaagttcagttatcttcatctacaacttttacccatttaagccaagccaaaaagaggaagccataaaatagaaagacgctaatcatttttagaataggtactgtatttggaccttacataccatatttcacttaattttcacaaaaagcctatgatgcagagattagtatctctatctcagagataaggaaattgaggttcagagaagttaggtaactttccctaatgttacccagctgagaaatttttctgctctatactagtatatatctattagctgagtccagtaaaaaatacccattaatcagaggaaagcctctgtggataccctgaacccagagttttccacagggattaagaatgcccaggatgaggctcatgagggtcaaatccttgggtgaagtgattttagtatacttctcatccttttttcagctcctccttcagcttcaggtgtttaccataattcttttctttagcaattaaatgctcttgccttagtggacatgagcccagattccctaggtaacagaacataaaacaaaaaactttctgttttagtaccttttagaaagtacaatcctggggatgcaggaataagtgtatgatgagtaacatagaaaaggaaggagaacaaattcaagggagcaaattactgagaagctactgcttagtataaattacaactgattactcaatctcataggaataactaccagagaggttgtgtaaagtactgtattttaggacgagagaggaagggagaagcatttattcaccagtatgagtagataggtggatggatggatggatgaataggtgggtaggtggacagacggatggtcaaataggtaggtaggtaggaaggtaggtagatggatagatagacagtaaatcatattgagttttgtgttgcagttgaccatttatatgtcaatcttcttcataactgcaagctccgagagggaaaagtcagttgttaaaggcttaggttcagacgggataggatttaaatcccagcttgaatgtgtgctagctctgacacctttgaaaagtcactcaacttctttgagattcggtttctttatatgtaaaatggggataatcatatctcattagagatggttgcaggggatggaatgataatagcatgtgaagaaagggctgagtatatagccccatatataataatagagtatactaagctattattttttgccatatcactcagggcttccaatatgatgtttcgcacatcatagacatgcagtcaatatctacaggtttagcttgaattctgttttagtccatttcttctagtttctattccatttcatcaccacatggcttttcgtatctaatttgcactagctgtccattgtcatatattgattgggcttcaatacaggtcattaataaccaaaaggattcataaggtaatgtgagcaatgcattatcttcaaagaaaagcaactgtagaaataaaatggaatttaaatattgatgttcaaacttggacacagggtgaggaacatcacacacgggggggcctgtcatggggtggggggagggggaagggatagcattaggagatatacctaatgtaaatgacaagttaacgagggcagcacaccaacatggcacatttatacatatgcaacaaacctgcatgttgtgcacatgtaccctagaacttaaagtataattcaaaaattgatgttcaaaaatatcaacatacaaaaacatccttccagttctgggccagaatgccagggattgtagctggaagaccctgaggtagcggtgctacccttgtgcttgtcaggtgggcctgaatgagataattacaatgaaaaattcggccatccctgctgttgaattggctttcaaacctgatgctaattctcaaatctgatgactaacagaagcccaaaggaagaaatattaagatctgtgagccaaaatatgtgcaatttccgtatatcttcttcagaaaattttaagcatatgcctgcattacaagttctcttttctcagagattttcttgtttttgttttttgtttttttgccttcatttgttaatctgtcaaatattaattgtctataaaattcccctgaagaagcaaaaaacatcataagcaaattcaacctaacatttatgattgattccaaacacaaacaagatattgctaattaatttaaaagccttcagacaactaaaggaaacttctgaagggaacaaaaattacactgaaagttaaattttacctgaagacaattcttcagcctcaagggaagcaaaattgtgtggaatttggcccagtgactcatctaataaatcataattgtttgtgcttcttttcccctgtttgcctaggaaaaaggctagaagcaaatcaggtctgtatagatgaacagatttaattcatttgcccttcctgccttacctagagacataatcctaggccaaacaactggctattgtgaaaactattaagcagtggtagactctcaggtggggaactggcagcagtagataaacttctcccatgaattgtctgctcttttcacacattcacctttaaaatggaagttaagaacaaatggaacagtacatacaaaacaccatgtgagatgaaagatgctttaaaaaatctcttcctttaggcaaattcggtcatcactatcattttacagatgagaaaactgcaggctttgtgcttgtccttgcaaatgtatcctttacatggtgaatatttatttgcatctgtataattccaatgatcctaatgatacacagtagataatcaatatgtctaatgatttgaaaaaagatatattgaatacttgccatgtgtaagacaccatgctaagcatttaagaaatatggagacaaattattttctggctgagctttctaaacaaagtcatggaactgccttgaatcatttgttctacaccaagaaaatgatgccaattgggaagatactgaaactaattttatcaacatgtccaaggtgctttttttctggagacaagaacagagtagataatgaacttagggcacaatttaggtgtcttacttcatacagaacaagaacctttaaaatgtctccagaaatgagtctgatttgaaatgtcttccacttcctacctcctgtataattactttgtgtaataatgtctcatgatagtctgacccttatttcttaccatgtttgtgtcccttcattgatttgaaatataacaattgcagtgaggtaggtaaaaataagtcttattcttattgtaggggtgggatcatggttactaagtagtggtggagctcaatttggaattgtggtatgcatattctaaatgcaggtttccaagctgaaagtgcttttgttaatttattgaccaaattgccaagctgtgcacttttcagatcttacccatttaacacccttttctttttttaatactttaagttctagggtgcatgtgcacaacgtgcaggtttgatacataggtatacatgcgccatgttggtttgctgcacccatcaactcatcatttacattaggtatttctcctaatgctatccctccctgctccccccaccccacgacaggccctggtgtgtgatgttccctgccctgtgtccaagtaatctcattgttcaattcccacctatgagtgagaacatggggtgttttgttttctgtccttgtgatagtttgctgagaatgatggtttccagcttcatccatgtccctgcaaaggacatgagcttatccttttttatggctgcatagtattccatagtgtatatgcacttagcaccctttttaaaattatctgtgctatctcttttatttaatcctttgctttttcatcctagctcaccaaatatttataagtctcaagggttaacacttttgtcctttttggcttgtacacaatttctttgggtaatgtcactccagtctctctgcttctagagcaatttatgtgctcataaccacgaaagctgtgtcttcagctgcttttctgtcctgagttcccaatacatagttttaattgtctaccagacatcatcacttgagtctcatatagaaggcagatagatgttccaaaccaaattccttctctttcttcatagttattggctcttcctgctgtcagtaattaatggcaacaccacatacctactggctagagttcatggatgtgctcttcgattgcttcctagcaccaccccctcccaatgcaaccagccaacacgtcatacctattctttcctctcattctccattaccagtgcccctcacaatttccaacctgtttctctattgagtcttttcttgctctttctccccttttatgcctccaattgttttgcagtgatctgtgagtattttaaatcagaatgggtttttggatgcatgcttacattaacttattcaactccacttagtcatattctcagaacatagcaattgtttcaataagtgcttgttgaatgaataaatgaattatttgaggaatggaggaaaaggggagaggaggtataatataaataaaaaatcaaataaactgaccttcacaggaagacagtttttgataactttcataactcatagtaccgagagatctttagtaaattcaccatagtatatatcctggatgtttcctttcttggctaagacgaactgtaaactgacatggttttaaaactgaccagaagtttagctaactctgggtagtcctcaaatagttctttgtggcaaagatcatgacgagggatcacaaaaggaactcccaaaccaagtggttatttcagactttgtgtgggcttcttttaatgaatttccataaatggaaacccactgtgtcactcatggttctgcatacagaaagcaggcccagtagtatgggattggctgcattgcataatgcaaaaataaacttgctggaccaagtgtattcttttgttttttaggaagatgcatacaccagtagaattctctagtcaaattagttgtgatctgataaattttcaactcagtagctttggacaaaagctagtcttagcacaaagaaaagtcaaggtcagtttatctggacttcaggaaggctgtgattgatctcctaacactggtgatcttctaactctatgcccttgagactgaatgaaaattaagcactttagggcttacttttggacaatgcgtgaagggaatagcgtaagggaaagcatttggtaaatgttaaaggatttgaccaaaaaattcattttatatggcacatgctctaagtttgaattctgtctgcactaattactatgatgtgaaacaagttaattaccctgactcgtttttatagttggtggagacgtaatgataacaatgattaaacattctaagtaggtataaaccaaaatattatatatattgtttattcttccactgtctggcacagagttgctttaatacatgtatgcttgaatgaaatagacaaaacaggtcaggtgtggtggctcacacctgtaatcccagcactttggaaggctgaagcaggcagatcacttgagcccagagttcaagaccagcctgggcaacatagcgagaccccatctcaataaaaataaaattgaaatagacaaaataaaattccatgttcaaaatactcctttttttcttcttgcatataccattatgatactttcctacttcttaaatatggggaattattagaaatttgtatatttgtgaccaacagctgaatgattaattgcaaaatcagttagcgcatttaataaaaattatatacttatatcttaaatattttattttgacttaaaacatttaagtaaacattcattcctctgtattttgagatacaactaaaccccttcttagagacagtgtttgctaagtctcatgctgcctttcttacaaaactcttttctgtaagtattacccatccattcagctttggaacttaaagatatttatgaaactaattgattgaaactaattgatccttctagatgttttccctgttttaacagttatctcacctattccaaattctgcagtaggttgttttttctgtgttttatttggagggtaagggaaaggcttcatttttttcaagtcattccaaagcattccatttacttttcatagaaaaataatttttttcacactcatgtttgttggtttacataataattgaatttcctaattatagttacaagtagcataaacagattcagaactgacttttgttaagcatgcaactccactggtaggatcaaacatgagctggcttgctagaggaaaagcataactgacaagctgggacatcaggtgattttacagagggaatggaaggcatgggtgaatctgaagaggggaggttggtaaagagttctgctataaagaggggttccacaaataaaacaaggtggaacaagaagtatgaaggggattagagcaagactttttttccaagttcactgggtaattaaactatgaaaccaaaggataagacaatgatagagctagaaaaggcattagagaacagttaattcaactcacccaccatcttcaccttctaccattgtctgctagcatttgatatgtgagaaaagatgcttatgcttaaaatggaaaattctttaacattgctcaatattaaaaatggaaggcaaggagagggataaagctagctgagatgaaaccttaactttcctttcaaaaaagaggaatggaggcttcaggaagaaattctggactgatgagaagcactagattagaagactttcagattctcttaaagcataagtggtctatacaaaatgataggtagccagggaatgggaggacaacgaaagaaagaacacagaaagaaaatcatttaattctttttttaaaagtcaagcataaaacaaaaaatagagtaggcttttgttttgttttgttttgtttttgttttgagacagagtctcgctctgtcgccaggctggagtgcagtggcgcgatctcggagtaccttcttctacagacagcacctcatccttcctcagacacaccgatgcatgtgtcccagcttgggcagatgctcatcaagggtctgcattttacacagaaatgaatttttaaggttttattaggttttgaatattatcaagtggcaaaggagctgtatccaatgttaaggtgatctgtcctgtggcatatttttcatcgcttttccaggaaataagcagaagaaaccgagagaaaggactgagatgaagagctctattaatcttgcccatcctctgtccagtaactgagtccagaaattctgtgtgggaattggggctaaccaaagattgagacctaaacatccaattttggccacacagagcctgtctttttaccaaagtggaaaaatcttcaactaaaacagaggcccaattgaacttgctgaaaacaagtttgtaatttctcaaggctttctcagttttaaaaatatatgtgattattccacgtgatagccttggagaaattaccttcattaacatactctctaattcttaagttgaccttatttcttcatttctctgtgggttcctttcacctcaacctccctgtatctttaagaaagagcaacaaatttctgaagcatggttttgggaaaccaacaatatcatgtccaaatacctagaaaaatataaaatgcatcagtgttcttggtcatatctgtatttatacggcttcttctaatgaagatcacaggcaccatctgtggagttttcccatcctattctcatcattttttggcaagggagaagagtccgtgttgatgaacaaatgggcacacctgaaccatgttgaaatgggaaagggagaccagtgggaagttctgctggggaaaacttcaggactcctacctaccaggatgtgactcacttagcagtggcactcaagataaaggaatccctctggatctctaagccaggcctcttgaaagcaaacacaactctcaaaagtggctttccaggaaactgaatgtgaacagcaagagaaaacagtatttctcattactttcacatgtttttgcaagttgaatcaggaaatcctcattttataatattgagaattgattacactataggagccctgaattatgtatcatatataattctcctatatatattataggagaattaattatagaagccctgaaagttgtcccattatatattcaaatgacaaactagcaacaaagtcagacatgtcatcttgctttcttgcattactttgatcattatttgtaattacttgctgtaattatttcttcacttattattgtctgcgtgctcactcaagtatgaacttgaaggcaaggaccatttgcgttttatgtatgccacatgctaagttccctccatgatgcctggtacatagtggatgctcaaggagtgtgtgttgaatgaagaaataggttccatctatttctgaaagattcagaacaaaccagagctgccactcactactggtccatttctgtaatctagtgtcaacccactccacctgagacaattaaaagccccaggaaaattcaagaagatgctttcactagaaactctcaggtcaagggaatgtcctgaaaagaccactgaagcagctctgagcttgcagtgaattttgcttattgttggttgggagttccttgcattacagcactcactgtctttgaaaattgtctctgtgaagaggtcaatgaccggatgagatgtttcattcttctcttctggtttatcaactcatattaggtcaaatcagcccaaacacttgccatgttcccataagaagtgaatgaagttacttcagttaaaatgttcaaatgcttatgaaaaaggccattctttatctttgccacccctaattcaaaagggtgtgctgtttccctagcttggcatgccttttccaggtcagggggttcctgtgagatttcctgaattctgcaaagagagtttggaaaaaattattgtttggtttaccacctccccaaggcctgaaaatagtcagtgttgatctctgtaccaaaaacaaacaaaccaccccctacacacaaaaaacacagtttcttctgagcgtgtgattcctgtaattagtgtgaagaactacttcagtgctccctggaagacctttggggatctaaaatacaagacagaatacccagttgaaactctccttccaagtggcacccttgcccatgaaatcctctttcccctactgcacaggcctcttcctgccattatgtatggaaacttctgatccctgcctgctccctgaaatttatcccagtacacctgaagagatgtggtcagttaatttacttaatattgtttttagatgtcattcacctatgagagtcaagactgctggtcaatatgatgtttagagaaaatatcaaccttacattcgaggaatcttttcggtgaactgcaagcttatggcaacaggggacatgtctgactcaccagcatattcctggtgcttgacacctagtaggcattcaacctatatctgttgcatgaatgagtaataggaatgattgttgtaatcatataccttcgcatatcaccaactcttcagtattttcttggaatccaaaagtcttagaataggaaaactgaaagaggtatcctttagtccccaatatgagcaccgtgcttagaaatgttaatctccctattttcccctccatgtttccaggcttctttacctgctctctctccttttttaaaacaatacttgcgtagtttattataatgtattatttttactcctctaattggattaactccataagggcagaatttcttgcctattttattcagaattgtatcccaagtgcccagaacaaagtctggcacatactaagggctcagttaattatttgtcaaatgaataaattaagagatgattatttagtatgcatcccaggcgtcagaaacactgcaggtgttttaaatccccaggcccaatcccacatccccacatcggtggaataagaatacttaaggatatgaatcccaggaatctatatttttaacaggtgatttgtgtagctgttctgagaattaccagttaatccaactcactcacctagagataatcctgcaacccaagacgacaaagtgtctttcaagtcacatggtaattcagcagtgcatctaagtgttatagttctattttgatgggctttctactccagtcatctttgagcctggattttagttaatatgttcactgctatctgcattcctggtctttgagattaagctcccggaggcaaaaattatggcttccaagcttactttgtggcaaatctcattaggcttaaggtaatacaggactttgagtcaaatgatactgttgcacataagaacaaacctattttcatgctaagatgatgccactgtgttcctttctccttctagtttctggacatctccattaagtggaccacccaggaaacgtttcctccaaagtaccttcattatgacgaagaaacctctcatcagctgttgtgtgacaaatgtcctcctggtacctacctaaaacaacactgtacagcaaagtggaagaccgtgtgcgccccttgccctgaccactactacacagacagctggcacaccagtgacgagtgtctatactgcagccccgtgtgcaaggagctgcagtacgtcaagcaggagtgcaatcgcacccacaaccgcgtgtgcgaatgcaaggaagggcgctaccttgagatagagttctgcttgaaacataggagctgccctcctggatttggagtggtgcaagctggtacgtgtcaatgtgcagcaaaattaattaggatcatgcaaagtcagatagttgtgacagtttaggagaacacttttgttctgatgacattataggatagcaaattgcaaaggtaatgaaacctgccaggtaggtactatgtgtctggagtgcttccaaaggaccattgctcagaggaatactttgccactacagggcaatttaatgacaaatctcaaatgcagcaaattattctctcatgagatgcatgatggtttttttttttttttaaagaaacaaactcaagttgcactattgatagttgatctatacctctatatttcacttcagcatggacaccttcaaactgcagcactttttgacaaacatcagaaatgttaatttataccaagagagtaattatgctcatattaatgagactctggagtgctaacaataagcagttataattaattatgtaaaaaatgagaatggtgaggggaattgcatttcattattaaaaacaaggctagttcttcctttagcatgggagctgagtgtttgggagggtaaggactatagcagaatctcttcaatgagcttattctttatcttagacaaaacagattgtcaagccaagagcaagcacttgcctataaaccaagtgctttctcttttgcattttgaacagcattggtcagggctcatgtgtattgaatcttttaaaccagtaacccacgtttttttctgccacatttgcgaagcttcagtgcagcctataacttttcatagcttgagaaaattaagagtatccacttacttagatggaagaagtaatcagtatagattctgatgactcagtttgaagcagtgtttctcaactgaagccctgctgatattttaagaaatatctggattcctaggctggactcctttttgtgggcagctgtcctgcgcattgtagaattttggcagcacccctggactctagccactagataccaatagcagtccttcccccatgtgacagccaaaaatgtcttcagacactgtcaaatgtcgtcaggtggcaaaatcactcctggttgagaacagggtcatcaatgctaagtatctgtaactattttaactctcaaaacttgtgatatacaaagtctaaattattagacgaccaatactttaggtttaaaggcatacaaatgaaacattcaaaaatcaaaatctattctgtttctcaaatagtgaatcttataaaattaatcacagaagatgcaaattgcatcagagtcccttaaaattcctcttcgtatgagtatttgagggaggaattggtgatagttcctactttctattggatggtactttgagactcaaaagctaagctaagttgtgtgtgtgtcagggtgcggggtgtggaatcccatcagataaaagcaaatccatgtaattcattcagtaagttgtatatgtagaaaaatgaaaagtgggctatgcagcttggaaactagaaaattttgaaaaataatggaaatcacaaggatctttcttaaataagtaagaaaatctgtttgtagaatgaagcaagcaggcagccagaagactcagaacaaaagtacacattttactctgtgtacactggcagcacagtgggatttatttacctctccctccctaaaaacccacacagcagttcctcttgggaaataagaggtttccagcccaaagagaaggaaagactatgtggtgttactctaaaaagtatttaataaccgttttgttgttgctgttgctgttttgaaatcagattgtctcctctccatattttatttacttcattctgttaattcctgtggaattacttagagcaagcatggtgaattctcaactgtaaagccaaatttctccatcattataatttcacattttgcctggcaggttataatttttatatttccactgatagtaataaggtaaaatcattacttagatggatagatctttttcataaaaagtaccatcagttatagagggaagtcatgttcatgttcaggaaggtcattagataaagcttctgaatatattatgaaacattagttctgtcattcttagattctttttgttaaataactttaaaagctaacttacctaaaagaaatatctgacacatatgaacttctcattaggatgcaggagaagacccaagccacagatatgtatctgaagaatgaacaagattcttaggcccggcacggtggctcacatctgtaatctcaagagtttgagaggtcaaggcgggcagatcacctgaggtcaggagttcaagaccagcctggccaacatgatgaaaccctgcctctactaaaaatacaaaaattagcagggcatggtggtgcatgcctgcaaccctagctactcaggaggctgagacaggagaatctcttgaaccctggaggcggaggttgtggtgagctgagatccctctactgcactccagcctgggtgacagagatgagactccgtccctgccgccgcccccgccttccccccaaaaaagattcttcttcatgcagaacatacggcagtcaacaaagggagacctgggtccaggtgtccaagtcacttatttcgagtaaattagcaatgaaagaatgccatggaatccctgcccaaatacctctgcttatgatattgtagaatttgatatagagttgtatcccatttaaggagtaggatgtagtaggaaagtactaaaaacaaacacacaaacagaaaaccctctttgctttgtaaggtggttcctaagataatgtcagtgcaatgctggaaataatatttaatatgtgaaggttttaggctgtgttttcccctcctgttctttttttctgccagccctttgtcatttttgcaggtcaatgaatcatgtagaaagagacaggagatgaaactagaaccagtccattttgcccctttttttattttctggttttggtaaaagatacaatgaggtaggaggttgagatttataaatgaagtttaataagtttctgtagctttgatttttctctttcatatttgttatcttgcataagccagaattggcctgtaaaatctacatttggatattgaagtctaaatctgttcaactagcttacactagatggagatattttcatattcagatacactggaatgtatgatctagccatgcgtaatatagtcaagtgtttgaaggtatttatttttaatagcgtctttagttgtggactggttcaagtttttctgccaatgatttcttcaaatttatcaaatatttttccatcatgaagtaaaatgcccttgcagtcacccttcctgaagttttaacgactctgctgttttaaacagtttaagcaaatggtatatcatcttccgtttactatgtagcttaactgcaggcttacgcttttgagtcagcggccaactttattgccaccttcaaaagtttattataatgttgtaaatttttacttctcaaggttagcatacttaggagttgcttcacaattaggattcaggaaagaaagaacttcagtaggaactgattggaatttaatgatgcagcattcaatgggtactaatttcaaagaatgatattacagcagacacacagcagttatcttgattttctaggaataattgtatgaagaatatggctgacaacacggccttactgccactcagcggaggctggactaatgaacaccctacccttctttcctttcctctcacatttcatgagcgttttgtaggtaacgagaaaattgacttgcatttgcattacaaggaggagaaactgccaaaggggatgatggtggaagttttgttctgtctaatgaagtgaaaaatgaaaatgctagagttttgtgcaacataatagtagcagtaaaaaccaagtgaaaagtctttccaaaactgtgttaagagggcatctgctgggaaacgatttgaggagaaggtactaaattgcttggtattttctgtaggaaccccagagcgaaatacagtttgcaaaagatgtccagatgggttcttctcaaatgagacgtcatctaaagcaccctgtagaaaacacacaaattgcagtgtctttggtctcctgctaactcagaaaggaaatgcaacacacgacaacatatgttccggaaacagtgaatcaactcaaaaatgtggaataggtaattacattccaaaatacgtctttgtacgattttgtagtatcatctctctctctgagttgaacacaaggcctccagccacattcttggtcaaacttacattttccctttcttgaatcttaaccagctaaggctactctcgatgcattactgctaaagctaccactcagaatctctcaaaaactcatcttctcacagataacacctcaaagcttgattttctctcctttcacactgaaatcaaatcttgcccataggcaaagggcagtgtcaagtttgccactgagatgaaattaggagagtccaaactgtagaattcaagttgtgtgttattactttcaagaatgtctgtattattaactaaagtataaattggcaactaagaagcaaagtgatataaacatgatgacaaattaggccaggcatggtggcttactcctataatcccaacattttggggggccaaggtaggcagatcacttgaggtcaggatttcaagaccagcctgaccaacatggtgaaaccttgtctctactaaaaatacaaaaattagctgggcatggtagcaggcacttctagtaccagctactcagggctgaggcaggagaatcgcttgaacccaggagatggaggttgcagtgagctgagattgtaccactgcactccagtctgggcaacagagcaagatttcatcacacacacacacacacacacacacacacacattagaaatgtgtacttggctttgttacctatggtattagtgcatctattgcatggaacttccaagctactctggttgtgttaagctcttcattgggtacaggtcactagtattaagttcaggttattcgaatgcattccacggtagtgatgacaattcatcaggctagtgtgtgtgttcaccttgtcactcccaccactagactaatctcagaccttcactcaaagacacattacactaaagatgatttgcttttttgtgtttaatcaagcaatggtataaaccagcttgactctccccaaacagtttttcgtactacaaagaagtttatgaagcagagaaatgtgaattgatatatatatgagattctaacccagttccagcattgtttcattgtgtaattgaaatcatagacaagccattttagcctttgctttcttatctaaaaaaaaaaaaaaaaaatgaaggaaggggtattaaaaggagtgatcaaattttaacattctctttaattaattcatttttaattttactttttttcatttattgtgcacttactatgtggtactgtgctatagaggctttaacatttataaaaacactgtgaaagttgcttcagatgaatataggtagtagaacggcagaactagtattcaaagccaggtctgatgaatccaaaaacaaacacccattactcccattttctgggacatacttactctacccagatgctctgggctttgtaatgcctatgtaaataacatagttttatgtttggttattttcctatgtaatgtctacttatatatctgtatctatctcttgctttgtttccaaaggtaaactatgtgtctaaatgtgggcaaaaaataacacactattccaaattactgttcaaattcctttaagtcagtgataattatttgttttgacattaatcatgaagttccctgtgggtactaggtaaacctttaatagaatgttaatgtttgtattcattataagaatttttggctgttacttatttacaacaatatttcactctaattagacatttactaaactttctcttgaaaacaatgcccaaaaaagaacattagaagacacgtaagctcagttggtctctgccactaagaccagccaacagaagcttgattttattcaaactttgcattttagcatattttatcttggaaaattcaattgtgttggttttttgtttttgtttgtattgaatagactctcagaaatccaattgttgagtaaatcttctgggttttctaacctttctttagatgttaccctgtgtgaggaggcattcttcaggtttgctgttcctacaaagtttacgcctaactggcttagtgtcttggtagacaatttgcctggcaccaaagtaaacgcagagagtgtagagaggataaaacggcaacacagctcacaagaacagactttccagctgctgaagttatggaaacatcaaaacaaagaccaagatatagtcaagaagatcatccaaggtatgataatctaaaataaaaagatcaatcagaaatcaaagacacctatttatcataaaccaggaacaagactgcatgtatgtttagttgtgtggatcttgtttccctgttggaatcattgttggactgaaaaagtttccaccaactgataatgtagatgtgattccaaaaacagttatacaaggttttgttctcacccctgctccccagtttccttgtaaagtatgttgaacactctaagagaagagaaatgcatttgaaggcagggctgtatctcagggagtcgcttccagatcccttaacgcttctgtaagcagcccctctagaccaccaaggagaagctctataaccactttgtatcttacattgcacctctaccaagaagctctgttgtatttacttggtaattctctccaggtaggcttttcgtagcttacaaatatgttcttattaatcctcatgatatggcctgcattaaaattattttaatggcatatgttatgagaattaatgagataaaatctgaaaagtgtttgagcctcttgtaggaaaaagctagttacagcaaaatgttctcacatcttataagtttatataaagattctcctttagaaatggtgtgagagagaaacagagagagatagggagagaagtgtgaaagaatctgaagaaaaggagtttcatccagtgtggactgtaagctttacgacacatgatggaaagagttctgacttcagtaagcattgggaggacatgctagaagaaaaaggaagaagagtttccataatgcagacagggtcagtgagaaattcattcaggtcctcaccagtagttaaatgactgtatagtcttgcactaccctaaaaaacttcaagtatctgaaaccggggcaacagattttaggagaccaacgtctttgagagctgattgcttttgcttatgcaaagagtaaacttttatgttttgagcaaaccaaaagtattctttgaacgtataattagccctgaagccgaaagaaaagagaaaatcagagaccgttagaattggaagcaaccaaattccctattttataaatgaggacattttaacccagaaagatgaaccgatttgccttagggctcacagatactaagtgactcatgtcattaatagaaatgttagttcctccctcttaggtttgtaccctagcttattactgaaatattctctaggctgtgtgtctcctttagttcctcgacctcatgtctttgagttttcagatatcctcctcatggaggtagtcctctggtgctatgtgtattctttaaaggctagttacggcaattaacttatcaactagcgcctactaatgaaactttgtattacaaagtagctaacttgaatactttcctttttttctgaaatgttatggttttaatttctcaaactttttcttagaaaactgagagtgatgtgtcttattttctactgttaattttcaaaattaggagcttcttccaaagttttgttggatgccaaaaatatatagcatattatcttattataacaaaaaatatttatctcagttcttagaaataaatggtgtcacttaactccctctcaaaagaaaaggttatcattgaaatataattatgaaattctgcaagaaccttttgcctcacgcttgttttatgatggcattggatgaatataaatgatgtgaacacttatctgggcttttgctttatgcagatattgacctctgtgaaaacagcgtgcagcggcacattggacatgctaacctcaccttcgagcagcttcgtagcttgatggaaagcttaccgggaaagaaagtgggagcagaagacattgaaaaaacaataaaggcatgcaaacccagtgaccagatcctgaagctgctcagtttgtggcgaataaaaaatggcgaccaagacaccttgaagggcctaatgcacgcactaaagcactcaaagacgtaccactttcccaaaactgtcactcagagtctaaagaagaccatcaggttccttcacagcttcacaatgtacaaattgtatcagaagttatttttagaaatgataggtaaccaggtccaatcagtaaaaataagctgcttataactggaaatggccattgagctgtttcctcacaattggcgagatcccatggatgagtaaactgtttctcaggcacttgaggctttcagtgatatctttctcattaccagtgactaattttgccacagggtactaaaagaaactatgatgtggagaaaggactaacatctcctccaataaaccccaaatggttaatccaactgtcagatctggatcgttatctactgactatattttcccttattactgcttgcagtaattcaactggaaattaaaaaaaaaaaactagactccattgtgccttactaaatatgggaatgtctaacttaaatagctttgagatttcagctatgctagaggcttttattagaaagccatatttttttctgtaaaagttactaatatatctgtaacactattacagtattgctatttatattcattcagatataagatttgtacatattatcatcctataaagaaacggtatgacttaattttagaaagaaaattatattctgtttattatgacaaatgaaagagaaaatatatatttttaatggaaagtttgtagcatttttctaataggtactgccatatttttctgtgtggagtatttttataattttatctgtataagctgtaatatcattttatagaaaatgcattatttagtcaattgtttaatgttggaaaacatatgaaatataaattatctgaatattagatgctctgagaaattgaatgtaccttatttaaaagattttatggttttataactatataaatgacattattaaagttttcaaattatttttta

SEQ ID NO: 57 - DNA, 43829 bp, Homo sapiens
gtgaagaaggatgtatttgcttccccttctgccatgtttgtaagtttcctgaggcctccccagcccttcagaactgtgagtcaattaaacctctttcctatataaattacccagtctccggtatgtctttattagcagcacgagaatgaactaatacacttccccaccacaatagtagaaagggcttatgtctacagacaagcttattctctttatttgttggaaacatgacaagttctggcttctatgactctttttctatatacatatttttcatagaaaatcaaaatgaaaagtattttcagattagcaaaaataatttttaaagttagaaatgtgatttcaaaacaagaaagttggtacaccccacagaggctgcttaactcatggaagattaagcaaatcatattctgtggggggaaaaaaacgaaaaaaaaaaaaaagccaacctgacaattccaaggcagttcaccagcattatttcaaaggaaaagcaaagttaaaaaaataaagtaaaatcaagataaagggaggagagagggaaaatattgaatcattcttgtttccctgtaaatagtttatcactctatttataaacagacacagagagcttttagtggaattgccagatattaattttttcaagagatttaatattattctgggagggagttatatccagttgtatggttctattttttatttgcccctactcctagagcatagccccttcaggttctcaacaggaagcatgggacattcttctttggttggccatgaacttaaaattctgttttcctggtaacatctaattacagtgttctctgcttaaagggtcaaccttttagaagctgctttctgcttgctttgtcagactttcttaccacacttaaactagctaggagttaacaaatatattgagggcagattacaaacagaaaatcaggctcacttctctgcagtcctctttttttctgggatcttggtccttcaagtcctgaatggttgttttgggaactctgaactccaatttctgtctccccagtccaaagagaaaagtgctgcaagttctaggctgctgcttcatgcccccattcagtgaatcaggaaatattttgagaggagaaataatgattgatttaacttcataaagcgtaatagcgtatgcttgccaaaaacatcagaaacaagttatgtcagaaatagtgtctctaccttaaattttgttcatcctttctatagtatacagttgtagatggaagtaacagctcagctgaggactaaatttccttatcccatttgccatgagatgtggccatatgacttgtttttgccaatgaaatatgaatgaaagtaattcatgccaccttctaggtcatggcttataaaaggctagtatgtctcttccatactcccttcctgcccctacctgggtgtggacaatgataaggcctgaggggagagtgaagccacaagatcaaaggcatctgggccctaaaacctcttcatcaaatcacgctattataaatgtcgtgctcttgttgttataataatgtactaatacataaggcttaaaaattacaaattgaaaatatatattgtcagaatatataaattataatctgaaataagggtttcaaaatcaattgataaaagaggaatattttaataattattaggataaagacaattctcaaaagaacgtattattaagataaggatgatgttggaaaagaatggtgttcaaaataactactgatgttcaaagtagctactgatttattattacatattaacaatggtgtatgatatatagcctatgagattagtaataaaaaattttaatggacatgtccagggttgattgatgagagaaatgaactgctaatggaactctaagtcaataaaacctgtatgacagtttggcaatatgtatcagaattttaagtaattatatactttgaggcagagtatacttttcccaagaagagaatgagtccaaaaggatgtaaacatcagaatatttatttcataatttttaaagaacccaaaacaaaaacatcaatgagaataaccagtgtacaaattgtgtcagtatcataaaattatgtttataacattttaagtattcttttcatgaatatgtattcatatgtaaatatatatatttaacttataaatacatgcagtgtgtgtgtgtgtgtagaaagagagagagagagagagacacgcacacacacacacagaagaatcaagacagatacttgccaaatggaaacagtaatgatcagtgatgatggtattcctgctttcatgcttatacctctttgaaccaattgatgtttttaagaattttaaaacaggcctgtattagcatttttatgggggaaagggggaaaataaaaatggtcgtttcttcaaaatacacagataaaatttggttggaaaaatagttagcaagagcaactaattctctaaaaggatggggtacccaagactcaacgttttatcttacccactttcatttgctcattcattcagtcatcaaaaattgcattttggggactctctatgtgccaggcacaatatccttaggaatcctattatctacctaaacttgagactcactgaggagtattctggctttcgcatgcccagaggatattcttgaacaattagcggatgcttcaaaaagtgtaataatgtggcaaggaatctaaatgtgtgctcctcaatccacttccatcagtaatgcagtgagtagaggtactatccagaacttttgcctgtggttttctcttctctttagcatccactactactgatagtttcatcaagtcattttagtctctatagctattttaaaatgtgaaataaggacttaatgcatatttcatcttctagtcattttaactttaaagattttgaattcactttcatggctgtactgaaaattaatttgttcaaatcagtccccattggaagagttgagagagaaaatggagatggtttccctacggtggtcatttttattgctttttagaggcagataattctttgattaaagcaatggtccccttttcccaaaaaaaaaaaaaaatgagtatggaaaatggacctacctggaaacctttgcaagtaacatcaggagttccaggctacttacttaagaacaccttctctagcacagagaattgtgtttagactcagggcagcactccctcatagacactttccaagggcaaaatagactaattatcttatgtactaatgatgctcatgggtgtctctcaggacatttagatgccagaaagaaagttatttccatgtaacatttgctgataatgataaattatcctttaagaattatcacatcaaatagataaaactagtttgcctgggtaggaaacataatgtggaagcctttatgtctcctactaaaaactttccatctattattgtatccttcaggagcagtgaccttccttctattgacagttctggcagaaatctaggaaacttgaatataactttaagcatccccagaagaacatgaattgttattacaaagcaaaatggtcactttaaaattgaaggttgaatatatatgcacattacttagatgaaaagtttggagtatatttgctttaatgattccagaattttttattttattttaagttctgggatacatgtgctgaacgtgcaggtttgtcacatgggtatagatgtgccatagtggtttgctgtacctatcaacccgtcatttaggttttgggcccacatgcattagatatttgtcctaaagctctccctcccctttcccctcacctcctccccctctacaggcccttgtgtgtgatgttcccctccctgtgttcatgtgttctccttttcaattcccacttatgaatgagaacatgcagtgtttggttttctgtttctgtgttagtttgctgagaatgatggtttccagcttcatccatgtccctaaaaaggacatgaactcattcctttttatggctgcatagtattccatggtgtatatgtgccacatttcctgtatccagtctatcattgatgggttccaagtctttgctattgtaaattgtgctggaataaacatacgtgtgcgtgtgtctttatatagaatgatttataatccttttggtatatacccagtaatgggattgctgggtcaaatggtatttctggttctacatccttaaggaatcgccacactgtcttccacaatggttgagctaatttacactcccaccaacagtgtaaaagcgtccctatttcttctcatcctcaccagcatttgttgtttccagacattttaatgatctccattctaactggtgtgaggtggtatctcattgtggttttgatttgcatttctctaatgaccagtgatgatgagttttttttcatatgtttgttggcttcataaatgtcttcttttgggaagtgtctgttcatatcctttgcccactttttgatggtttttttttgtcttgtaaaattgtttaagttccttgtagattctggatattagaccattgtcagatggatagattgcaaaaactttggtggcttttttttccattcatctcttctgccaaaattatgacctcatttaatttgtttgtacatttatttcttctggagaccccatctccaaatcaccatccttatcttttttctcaaacctcagggaatactggcctctgtacatatttttaattgccttggtcttgtcattccctgggtctctatgtatgttgttcatggaacaacacatgcttggaatattctttcccttctttatactctgttaaattcataacctctgtagtaggcagaatactccaatgatgttcacatcttagtctccagagcctgtggatgtgtacatggtaaaagataattacggttgcagatagtattacagttgccaatcaactcaccttaaaatagggaaagtagcctggattatacagctgggcccaatttaatcagaagcgtccttacaaatagaagagggaggtagaagaggagagtcacaggatggtgtgactatgggaacaaggcacagagagagattatgttgctggtgttgaagacagaggaagaggaccatgagccaaggaatgagggcaggtcctggaagctggaaaagacagggaaacagattctcacctagaacctccaggaaggaatgcagtcctgctgacaccttgattttagtacaggcatgtcaatgtcagaattcaatgcggtgatcttgatgtcagaatttgatgctatggaattgtaaacgaaaacatttgtgttctcaagaccactaagtttgtgatcttcacacagccacaatagaaaactattacatcatccttcagattgcaagttaaaaatcacttattaatttctccagatatccatgtttggagacctttaagcacagtacttactttaaaaaactttaaagtatgtaaaatagccataactaaaatttaacttaggtgtttatggctattttcccctgctagtctgtaaactccaagagtatagttcttgtctgtctgtgctttccacagtgtcaataaatgtttattcagggattggctctcccctttctcttccttacatacatatgcttccaaaggaaatcagagaaaatcgcccaaacaaaatcctcatagggcaaagatcatcagattccatatagtaacccatttaattcccatagtgcttagctttcctaggtcattaattctcagagagtaaccccctgaccaacagcattagtatcacctgggagctactaaattaggggtggatcctaggatttgtattttaataagctgtctccgtgatctgatgatgcacactgaagttcgagaattactgctttagtccggattgttgggccccacgcacagcatttctgacttagtatgtgtggagtagggcctaagaatttgcatttctaaaaattctaagtgattctgatgctgctgttcctgggactttacttgaagaataactgacctaaacaatgttaggccaggggacttctagtggaattttgtcaacaaaacctcacagcttatgagttttttatgacttagcactttgtggtttatgtgtcatcctaaaccagaagtctatatttatttttacagcaagattattatggccctttatgaaattcagcttacatctatattatagcaaatggcagttaggttgagcaatccaattaatatatctaagactatctagtttttaatcatacatattcaagattgcatgattttctgaaacaacagtctttgcaaaaatggattaaaagtgattgtaaaccagtttgctttgctttacaacctactgtatgattcttttcctaaaaaatgaatgtaaaattccccaatgttattatatttctgacaaagtgacaacaattgcttataaaatatttaatagcatgctttaaaaactaggaaatataacatgcagaacataaattacattttaaataatgatttggtttaatgcaagattgacgatgtatgcagtttataaatcgttttgaaatcagctttcactcaaatgtttctgtaactaagaatgattatggcaccactcttgtgcagggagggttctcatggaaagttaagttattgtcttaaatcaatatgcccgatgcttgtgatgctgataaggcaacatatttcaacacacacagtgacaaatggtggcctcttaagctgattttaaggtgcaaatagaatctgctttttatccatttgccttctgtagagaacaaatccttacatttcacagttgagagatacaacacttgaagtatcaatgacctgggacaggtatcacattgctttccattctcttataatagattccattattaaaagaagataaggatgagagccaaagaggggaacacacctccaggggaagctgaaagccagaagacagaaagcagatggagggagaataaaaacataacgaggcatgaaaatgctggggagtgagaggacttagttgacaaatttgagcattttgaaacaactagcagttggtttatggtgactgtaatgaggtaattaagaaggaaaattaagaataggtttatttaaaaccatgtaagttaaaatggggcgattattaacgtgagaaaatataaacataataaaacatctgtctctaatgaacaatatatttaccaagttacattaatgtataatgtgattttctataactgaaatgatgatataattagactgggtaggaagagacagggaaatggtcatgtgcaatgaggctgcatctaccataacaggaagtacacagttagtatccaaaaattacaaatttagaaatagcagcataaaccatttatttagaaatatgagaataagtacaatgacataaccaagaacaactacacagctaaacgtattaaaagtgatttctttccaaagcagaaatagtgtgggaatggggcagagttgaggtgctttttataataaccccttttaaatatgttcatgtattactgataaaatgaaacaggtaacacctaaaaagaaagactatggtgatttttttgacaacttaaaaagtggtttacaaatttattccattttcattttgaggaaacatttcatctgtaatttaaaatatatatatcatcagcaagaagactcaatcagatatctttaacatttgggtgttgagttctagatctgcctcacagaattgcatgagcttgggcaagtcatctcatcttctgtgaactttagtttccccgtctataagagttactgtgagaacttaatgagattatatcttaaaccacttgggaggtgcttgacacattatttcttacacgacttctcagcaacattagccccaactttattcttttcttcatgttcatagtgtctgttttatcacaatctttggcactggtttctatcactatgaccacatcttctcagtctcttttgatggtttctcctcctagaagcactttcctagagactcatcattctacagcttcacaccagatgactacaattattttcctggcgtgaagagccacaagcaagcaactccacattcatatttccagcacagatcatgcctgtgacttccagacctgtatgtctaactgcctttttgaaatatttttttggattattcaggtgtgcttcaaactcaacctatctaaacccaaactcatgatctatttcccccaaattttttcttccactgtttcttgatttcatgaatagcaccttcatccttccagttgcacacccagaaatctaagagttccttgacatctcctgcgttgacagttaaatcctgctcacatccaaaatgcaatccagcaacatagactgtggattttacatattaaatatctctcaaattgccctttcctctcttcctccaccaccactacaaacatagtctaattcatgccgtaatcatttcacacctacgccataaaagcttttcaactatttttcccctatccattctcacatcctataatcaattttccatagagaatcctgaactgttggccttttatcactgtcccttcctctggcatatcacagattttcaatgcattttttaaaataaatgcctacttgcctgaggtctatttaagtagttttgaatgtcaaataaactaatgtaagcactgtaaatgaaatactgtaaatgaaatattgtgaagcagggtttacgatgtttgggaatattgactttgataccttagaagtaaattccattaagtgtaaaaagctctaccaccttttaagggaaaataaattagattcaaataggtagaaaagcagggagaaagatgagatgtttgaatagaagaaggtcaactttttgatccttgctatttgtatcagtgtgtttgttttttgctttttgtggcatctgtgttttcctctatttatttggatttctgggatagctagtgatttaagacatttgatgtcaaggtaaaaaattatcctctgtgatgaaagagagaacatgtttattagtttcactctggaggagattacaattcaaccacacgttaatgagttagcaaaatggtcagaatacatagtgtaaggaccaattcgaaagcataagaaaagagaaagagaagccacatatgagagaggtcagggggtgagaactggccatgtgagacaagggcaaggaagaatctcagagcctggttgtacaaggtgactgcaaaccactgcaccatatgggggagagtctgggggacccacttgaaagcagagttgcagggactgtgaaacaattattttgttatgctttacactgagcagacctggaatattctacttttcaaggaaagcaggatatgggaaatgtgtgtggaagtttgaaggaaagccgcaaacatgagtaaatgctaagaacattaaatctgtgtggactattttcacacaaaaatcctgagaaagtgtagaaaaaggaagaccaagtctcttgtaactaaacctcccttttggtggaaatgtagaatttcggttagatttcacaaggaatgtctaaaatcatctaaaatccctaaagaagcattgcttccaagtcatagtctggcagattgtatgtgttggttcaggcctgtggctttgctgagggatttcatggaaggattgaacactgcaacccctcgttgtgaatgaagagcttctattgcaggtataaggcagttgttcagcatggcacctgtatatgaaggatcaggaagttgataatacaaaatgtgagattatcattgttcattttgctggtaccatttgaaaggcatggctaagaaacttagtgttttggttagtcattctgtggatccagagaacccaagaaaatatattagttacagaaaaaagttttggccagaatctgacttttcatgatatctctcttcatgttagtatattatattgactaggattggctagagggtggaaaagctgagacttcctttgtggggctacacagggagcttctgagcagagacatgggataacatgaaaaagatgaaagatggcatgatgtataatgcgtggttggtcatttcatgaggtgaggctcctcatttttttttaatttttaatctctaactcaatagtacttttcagttttttacactatggcagaagaaaatatgacttcttattcagattttgcagctattcctctgtcttctcagttttcttattctattacatttctggtaagtacaatccaacccatcccccatctgcaggatattgtgatctgtgatgttacagtaggaatttgagaaagctatgctataatggaaggccacgctgtcacgtaggatatgtggggcagagagcaagaagtatcacccatccctgggacccagatactattctatgctttttggaccccccgttttctttcttagttagtaaaagaaatgtcgtgacagcttttcttactaaacacatactcatgtagtatctgtgaaattaaaagttgactaaggtgttaattcatagaggtcttcacagtgccctagattttgtttgttccagctcatatttcacattttgtctttcattatactttgcagatgttctgtgttattcttttagacatctggtaaggaagagacttactggatttctagttagtattttgcgacctagaactgctacttgagaaggaatgatcctatatcattcctcttgtagcttaaatgtagttttcattgacttacagcttttaaaagtctgcagtgcaagctgtgttcgttacagacttaacctttctaccatcttgttgcctgactctccgataggtcatttggctatagtatttccaacctacggttctccaggactggttcaactggaaggccaattattctaatcctttttcatggctctgtgtgatgctccccaaagctgtccatttggccaacaaggaaaatctacctatacaacagacaccctttagtatgtaagtagaaccatcaatacattatttaacgtagacacacagtctgtattagtcagggttctcttggttacaattcaaataaatttaagcaaaaaagtaatttattggttcacttaactgggaagcccagaaatgatgccttcaggcatgactgaatctgcattcatattctctctttaacagtatctcttactccccatgttgtttgtctgtctcttttctctgcatgatggtctcttaacttcttgctgctggcagctctttccatgtggccagagaagatggccacttgtaaccccaactatacaacgtctcaccttgacaacaagcagaaagaaaacagcactcttctctgtagctctgtatcaatctgagacaagactcttattgacattacatgcagcacgtgcttatgtttgctgtactcagtatattcgggggaatggagtactgtgattgactaggcctaggccatctgctcagcccagttacagagataaagaagcaaaactgataccccatcaaaagcatatagaatggaggaagtattttctttaaaaaattcagagtataggagaagggaaatgtgctacataatagaaattacgattgctacagtttggcacataagttgtttcctgttagtaactcttctgaggttgaatactgctatggtctaaatgtttttgtcctcccaaaattaatatgttgaaacgtaatccccaaagtgatgtgttagagtgcagggcctttgagaggtgattaagtcatgagagaagaaccctcatgaacaatattagcaccattatgaaagagactgcagagagctagctagctcctttcattatgggttataatggttataatggaaaggtgttcatctatgaagaagcaggtcctctctagacactgaatcagctggtgccttgatcttggacttcccagcctccagagctgtgagaaataaatttctgttatttataagctactcagcctaaggtattttgtaatagcagcccaaatgaaccaagacaaatgctaaaatctcataagctatctgacaaccattatcctattgtagtttgattggggatatttggatggcagagaaaagaaagtgtatctggactataaaatcaaagttgatgacttattgtttagcttcagttttctgtcacgggattttttttctgaccttcagatttcaaaagttactacgctgttatactgttacctgctgtaagatgattattaaatatcaaagtgagagatttttgttttgtaaattcatgccttccaaatgtaattttagatattataccaggcaaaagaatacactccaccaaataacataaaatctttaaaaattttcatacattttatatgttatggtctgattaaaattcatatttcctttcataagaactcaagataaacccagaggagaaaaattcgtgcattaatattccatgaatactggggatcagtaaatctagcaattttctttcaactacacgcgaggattggaataatatcatgtagaaaagacaattctggtttatacttataactcatgaaaatacatacattccaagcttggcaaagtacattttccaatttctcaaaaacatgtttagaaatgaattcaaaagggcatcagtggaaaaatagaggaaatactcttaccttgtgaaaaacaggagataaatgacaattctaaaatgtcatagtgccatattaccaaaatctctttcatgccttttattcacatgccccaatgagtgcatctatataaagtttcttggaagctggagatctgaggatcagatgtaatgtcattctaaaataatccaggagctggctgagtctgcttaaattttgttttattttagtttgttttttcagagaggatgcttaatttttttgtattgcctcccttttaggagataaaaaccaagcatgctttttggagccacagtaagaaaattaaccatatatcagaaacattagggtcttagattttctgttccaattcttagaacatggctgtgcaatgtaataattgtgattttagttcctcacactaattacaatttttaggtgtacattacattgcagttctaattaattgatagaatactgggtagaacagtttttaaccatactaactttggtcatcacaggaaggggaacatcacacagcagggcctgttgtggggtggggcccggaggggggagggatagcattaggagatatacctaatgttaatgacgaattaatgggtgcagcacaccaacatggcacatgtatacatatgtaactaacctgcacgttgtacacatgtaccctaaaacttaaagtatataaaaaaaaaaagagaaaaagaaacaggcaaatgaacttcctgaatggttatagaaagtgatatctgagtaataaatgtcaggtcaggctctgttagttagaccaaacaaatccataaattgaggaattatctaaaaaattcaaactggactttaattatataaatggaatttggggttggcatttctcaaatcaaagttgcactctgatctgtactgcctgacctcatcagattgagttcattccaccttgtgttctgtggccctgacagaaagggcactctgagggcacatattctcattcagtatttcacactccatgatgatggcctcatcactgtaaaaagcttaatggtagctgcaagaaaaggcaccataaaatgtatgccagccccttgggtttctaaatttactgaatttggaatatagaaaaaggttcttcccacttccatatagagaaaaaaaaacagagaatgcccaaataaaaaaaagaaaaataataagatcagggaatataaaaaggggaaagttcctccagaattgtctaagatgaaagctgccctgactgactgaatgatcctgtggctgggaaagcgagagtggcattccacatgttcaagatccagcacaacagtgataggacttccatcagttgatagagatcttgagcccaagacatcaaatcctttagaccaggaactctatacttctcaaatgactgtctgcccttcttttccctcctgctactttaccaaattttgcagtcctgtgccaaagattaaattcccttggatcaacatggaataatcagctaacattttttcaagcaattactaagatcatcaactttttttaaagcatcaattttgcaagaaaattttggaaaaagttaagtaagtacataatatacaacataatatattgtgtgaatctgtaaagttcaaccttgagactggaaagatggtttccatctataggtgtgtcacttctggtaaacctcagcatgctctggagtgcaccttaattctctgaccataagagatatattaatgaataaattgagaagcactgggaaaaagacacataaaatccttcagctctacttttacagatagttatacacttttgtctctaattctcataacaaagggggcatttcatgtttgaaagacccactggaaatctctacttgcatatcctcacttagaaatagataaatcctaataatgccttatctatgtggccaatttcagatgttttcatttgagatatttcacatacatactaagataagataaaagcaaagtagttttcaacaataactagggatggcttattcttcagtagttttgttttgaaaggattttaaatttacataagaattgcaaaaatagagcagagagttcccatatattctttttgtctgatttccctaatgttagcattttcatattcatagtacatttatcaaaactaagaaattaacattgctataatactattaaactacagacttcattcatatttcccaagttatttcaaccttttttctgttcccggatctaactgcattcttgcattttttctttcctcttattctcttcaaatactacaatagatatagcattactacttttaagagctttgctctttcaagatcatcaaaggcaactaatagcttcatagtttttttaaaaaaaatatgttaaacttctgcattaaatctgctggctgctttaaagcagtaagaaatgtactgtgtggaattttaagcttgagcatcaggaaaatgggttaaaaactacaaccatttctagacacctacaatctccttccctctagcaaaatccttttcagctaggaactgattttctgataggctagatttgattgatttcagaaaagctcagaactttttgttaggaattttccggcttacttacagctcaaactcccactctcttatggcacagataaattttgagtcgctttgaggcaaggacctgttcttactcacttttgtatcctgaacattgccttaaacttgataaatatttgttgaattaatgaacatatgaaatttcctagaatcttcaagctcgagtgaattggagaaaacttgacacttccaggttaattagactctggagccttcacctctgactgcctttgggatgttttggtgtagatagtgtcaaagaggttgataggtgatgtgttatagacggcttcatggaaatgtcatgaacctgtgtagaatactgccagaaaactcgccaacttttaaatatctaatgtttcttttctaagagaactaacaagagcccttttcttctcataaatacgcaatcaacagattatagaaaaatacgtccatagcacaatgacaaacatcaaatgaagtattggtcatatcctgcttgggtataagcaattttctaataataaagctatcattcaaagagcaataattctagggctctaaatattgacatgtgaagcggaccagggcaggaatgtgctcagtgattaccctactggtctcaacatgttactgttttgccacaatccaaatttaaatctcaatggcctaggttttttgtcatctttctgtctgagttcttgaacccttactgatagactggaataaatgataaaagatcctgaactgccttcaggatcttttccctcagaatgagacacaagtcaggtatttgtagatggtctcctgacatacaacaagcatactgaatttgagaaaggggtctattttggctcaggacgtaagtaactccatagcaattatttccattatagacagctgatttatggtaatgattaactcaaataatcattttatttaaaaattcacttggaaactgaaaagtcaaacttcaatttagcaaaaaattgaatatgagaaattggcttctactatataaaatttttgctaaatatggggttaatcagatacctatttatgtctcatttctcacttgtcttagtgaaatgcaccttagtttgactcagaaagcacaatcaagtcagcctgttgcactatctttgcctacttgcatttcatttctttctcgcttcaacatttattagatgcctatttgaggaggaggaagaggaggttaaaactatgaagcatacgcaaatcagccacctttaagtgcagtaattaaagatgatagtttatatatattaatatagtcactggccctgttctttcaagtgctgtgaaatgcgtgggttggatagagttgagacttcctcacataggttccagcacctttcaggcaactgctattagtaggcaattacttgatggtttctgttaatagatcaggtcaggtttaacttgaagtcacttgcttttatactgtgtctcataacagtcggcatttggtatcaattgctaaaacgtcttttcttcctctggcagcagttgaaattaatttggtgttcttcctgctggcttatccctgtgcaacattatttcttcttagttcttgacataaagacttcctctagcagggcagccaacctaatccccacaaagaaaatggcccggcaggcaacccaggctgtcacagcagcagacactgaacccaaacccaggtcggctgctcctttgccccctttctccttctccatctgcgtatttagagtgagactctaaagaggcttttgtgcaaacttcgacttatattaagaggatatacactgtggtaggaaaacgagaggctttgggtttagatagccccttttttacactttgattccaccccttacttgtgtgacccgggacaagccatttaatctctcggtacctagtgacttcatccgtaaaacaagaaactcatttcaaccccatatatacatacatacatatgtattacctatcatatgccagacagatagtaagttagtaagtgcttcaaaaattccttcttggaaggaaatgtcctttctacagcctcaatccaaaatgaatggttgtgattttttggaggtagtctttttaaagctcccctgactcaaatagcctagctgagtgaagggacagccttctcagggccctgtgggcctgtcacaagcaatgatttatggcttgtgacagcacgtgctcatgtttgaaaccacagcttgctgaggctagagtgggtttctgaggcttttgtgtaatgggctttgtttcatgctaataaacacaaaaacttcttctctataaacatgttccttatggacccctgaggctatagtgctgatgagtttatttttttaaagaaaaataggatgaactacaaccacccaattagagagactcagtcggatcactagaagctttcagtcctggacacaacagaagaggttttaagggactcatgcaggagaaaccataatgagaaaaacacggaatttgcttttattcttagaagcagctttgttttatctctaggctcagagctgtgctgctggaactgaactcatttcccaacaaactgtttttgtttctcacttgttatgtgaataacctcagaaatgcaggcatcttagtccctgcaagtgcaaagagtttgacgacacaatgagtagctgtggacaatttccaactctcacccggaagcctgtacctattggaagagagtcgccaaatcctaggatggttctgatccaggagcctccctagggaaatgttaacaaagaggatgaaactaaagaagtaattctctaggtactgcttttacccatgggctattgcccagacactgccatgtgtgcattttttaagattatttgtggatgatgggatcatgggcagctgatgaagaaaaacatcagaataaaagttctaaagcatagtaagcctccacctgtggagccaccctgatgtgcagatatattctaaagtttgagtccaagctgttccagatcaatgccattaagattagggctgcatctcttcactgagctagccagctctgagataccacagcagagttctgattacatacatcccttccttatcttcctctaattttttttcctctgttgattcccccattgttggcatatcttatcaaggtttgtttttctttaggtcgttattaaaaataagagagaaagatgtacttgcctactcttaaagtggatcttaaagcagatgtgtttgttccatcaactcatcctccgttcatagtagcatattcagtacagatacatttattaaacactaataccagccatatcctgtaccatgcactaggattcaatagtgagcaaaacagaaacttaaaaccataaccaaaaaatcaaagaaatataacactgtaaactataatcagtggcacagaggagaagtacaagctacaagaagaacttgtagctggggatctgataaaggcttatgagtcacagaagctttcctgagggatggttttttttggatcaagacctgatgaataagtaaaagcaaaagcaagataattctgggccacagaagcagcaggtgcaaaggtcctgaaccaaaaggaatttggcatattggtggaactgaaagcaagagagtgttgccagaaagccaaagatgagtggaagatgacaaaggcagggttgggaagcagtggccacatcaagtaggaccaaagacattgggtttttaatctacaaaccaatgagatacatttaacgtttaataaaaagagatatgatcagatttgtttataaaatattaaaataactgcagcatgtagagctgattaaagagagggtgtggtggttttaaagtatgatcacaaattctcttatattctttgtttcaatagttggagtataattcttctcttgagtgtggatgggttcagtgattcactcctaataaaaacggacaatgcagcccctaccacattctctttaatcatttgttctggaggaagctagctgccctgtgatgagaaactaaaaacttctagcaagaagcttggaactccaacagccatgtgatccaactagggagcaaatcctctagccacagtcaagccttcagatgatggtagcctctgtcaacatcttgacagactccaagttagaacaaaccagcttaatggctcctggcctcccgacgttcagaaactgtgtgagaatataattatttgttattttaagcagctaaatgttggaatgatttgttgtgcagcaatagatactaaatatagaaggtaaaaacagatattagtaggatgtttccacagcagcccaaacagataatgatgccttaacttaaagtgaatgctactcaagtacatcttcacttcctctttctaagcacacaccatgggtatcagatatgaccactggaaagcagtagaggtagctttgaatccagggtttgctatttgattatagaggatcttgtagcgcctctctatagcaagggttgttttattcaaatgatggagccactaatattacttccctcttagattacatgagagatgcatgtaaagtccatagtaaaggtgttagagcatagcaattgacagtttttattattattattatttagagtatatccatatagatgataatttctctctctgaatcctgttctttgctatgagaataatcgccattaaacaccacagtatcactttccttatcaaattacattcatggattcccattactttcaaaatacacttgcaatttttgggccatatattaggggtttctaccttgaagtgccaccttgctacctacgtgaaagtgaaactctgctccctgcaaattcttcttctccttagtttattttttcatggcttgtgatgtttggttgagtcacttaatttctattatccttagttttcacaccaatatattgtacatattaataaatacctactccttcccactgtgcagggaaagcataataaaagttcaattgttcattgtgacaaacttatcctatttacaagaagcctgagccatgtatgttgcacctcctgcatacacatacataaaaatcaaagagccaccaaagagcattactctggaggttttactaactttgaggaggcacttcaggcgtcaggcctcaggtctctactggttttaactcactttcagcatattgagcccatcttcctcatctctagtttcccaaaagaagtttgagatgttgattaatcactgctgattcattctcagtcatgttttattgcttaactaacttcaggcagtctcttgccatcctcagaacaatccaaagccctattgctctacatttagacacagaggatgaagaggaagattccttcataggaccaggcaatagcaagtctactgacagctactgagatgacctcaaatctccaaactagtctgacttcactaaccagaggaactggagaaatgcagatgtttgacccactttaaatgcatctgtcattttaaatagtgcatatttttggtgacttctcatttgtatagcccacagattggctcaaaagtaggaatgcataattttttactctctatgttcccaaccgagattattacccctggtagaatgcccttcagagaccagtggtagtacctgaaaattgtttatgggcctcttcctcccctcttcaagcctcctttaaaacagagagaagctgcccaatagagagactctttaatttgccaaggaccaacccaacccaaagtgtcttgatcttttaatttttcttgtttgaagtagcatcaacacaaagtaatttttattaatctaaagtatggcagtgattttgcaatacggtatataatgaggattttgtagaaatctttgcaacttttttaaatgttcatatttccaataaccacaccctagatttctcagcatgattctgcatataaaacataactaccaataccaagagagtaatttaataattccattgctcttttgtatgatctatagccttcttatatctacccaaatatgtttttcaagtttcctatataatattttagatatagttgacatttaagtggcccctgaacaaagatcttatttatcaacaaactgagatgcagtctcagttccaacacttagaaatatttttaaattttttattgaatgagacaaacaaaaaagtacacaaatcttaagtatacatctcctttgaatcattataaaattaacatacccacattcaattaattgtttatttctttgtgaatcatcaaaaaacacccaatattagctttccctgaaaagggtagctatataaattttaaaatgctaatcatgccattatgtattaattttcttcttaattggatttttaatttccttattaatacactataatctagtcattattactgatatagatattttagcatgcatatgtgcatgtttgggggtgctgtatgtgcacatttgtgttagggccaggatgggactgatttaatctggcctgtagaatcaccaactctattaaataagatatttttagatatttatgatgaaaagactcaaaacattaggcctttgttcttagtccttgacatagtatctgaaaaatttaattccttcagaactgatatattgaatagacagattctagttttgaatataaaaagttacagctggaaggtacctaaaagacctcattttacatgtgaagaaaccaagtctatgtacttgagtgagtagcccaaggtcacacactaattagaggctcacccaggactttcccatgccctacttgattactcttaacagctcatgcaacccaaatgtgctattatgactgctgtttctgcaacaatcagtaaggaccagcactagtgtgttacagagagcagtcaaaagataaaagataaaagaaataatgtacactaacaagagaacatctcagaaatttcccctcttccagcaaaccaataccgacaccacttataggaacctgactgggttgccctttatataagtatatgttgtagggaaaatgccagaagaaatactacaaaaacaaggcaaagaactgttgttttgactgtattttgaaaaatagcctgaaaactattttggtgtgatatacaatatgataattttgaattcaggttgaaacaaaattggttttctatcttggttatcagtggggggcagaaaactctgatcgtaggtactgtttatgcactggacataggtgtaatgtgtgatcacaggttatttgtttctaacctcagtttagaaactccaagtcttggtctccacaagggaaatacataaccgggatattctgccccactccatatgaggttctgcccatctggttatgatgtttacgtagatacacacttgtacacacacagtttcctggaaggaacaggaaagtaatggattctttcagatcagttctcatgtgcacaggcatacaaccactttgggaggatttaaagttaggcaataattaaaagctgaagtaggtgtctctggaagcatctaaccaagtctgagtcattatcaccatgatggaagtgccatgtgttaccatattcctgagctatttcctcatttaagggcttcaacagtacaactcagggtcatttgctaaaatgatatttgcatttccttacaaatacattctaccagtgatgtttctaaaaacatcctcttattcatatctaaatggctatcttgcatttgtgcctcgattttgagatgcctaagattgttttcagaagtaggtgaaataaagaagaggggagaaagatttccgtataaattgctaaggtgaaggggataatcccttctattattgggtggataagtgtgtacatgagttaggcaatgtgaaaattttttctcagtgatttaaatctggttgggggagagggtagagatcaagaatcttttatgaaagttcttaatttccagttggtacgttagacattattttctcaaagaaattacagtgatatatcctaaaagtagtctattaaatctaagttaactttttggtaaaataagctagtcaaggtcaatgttgtttatataggacaacggattctgaatttctaaaaactcaattacatggaagcttttgggaataatgatcacctaggcttattttggtctgttagtttttcttttgtaataatcattctctgtgatgactgaagtcagttgactgttctcaaataagattttaattaaattgataaatccacaggaaaatctatgaaatgtttataaagttgcccctgaaatttttttctttcaaaactctggaaattaatggtaattaaaaaaatagctatcaaaatttgacttgtgttgctcaaagaccatgtgaggaaatttatggtttcagacataatgaatagctagtattgtacttactttcccaccttaaactttaaaacctgcagaaaacatataaaataactatttgcagttatgagactggagcccaggcagagctacaatccttaagagaaagggggcactgaaggtaaccctcacattcactaaggtttttttgttttttttgttgtcgttgttttttgttttctggaaacaatttctggactgtggtgcaggaaaatggaacccatgcagacagtgatagataaaaatgccatgacctttttgtaattttgacacacatttttataaaacgatatgctcttcattaaaaaaataaagttttacttggaaattgaggcctgacaactcacaagcaaactaaaacatttgctttttctctgttggaataatatcttactacatgttttagaagaaaaaaaatcttttcctcttccacttttttacctttgacttcaggaattctaatgctaatttccaggtggatacattgtagtatataccttttattgtctaataaaatcaaacttttcctaatttcggtctccaaggagaatgtattgctttgggcttcaaatcaagttaactgaaggggcaatatctgagagcaatagcagacaaagtaccttcaaagatagccgaatgaactaaccagttgaatcggatgctgagcatgttgaccaaagtgaagactttaggttgacgcaactgaggtggcattgtttttctctttactcattggctcaaagtttcagctccaatttgagatcacttttagattgggattgtaaattttcactacatattaaaatgtagtcaatcagcagcacaagatgcaagcttcacccctgggtgacacacatccctaatctactagaggtcatcaatgccaaggggcagccatggttcatcttctgggctgccatcttacttgaagtttggaagaaataatgattccttttagcttccatcccacacagacatactgtgaaaatgcaaaaggatacatgaacttaaagataaaatcagaaacttaagaaagggagcccctttggtgcatatttctgacagcccacggggtctgtgtttattcttccctgacactggagagaaatagtttgagaaggaagcgcacatgctgtcacatcagcctgggattcaaactcatctcagcctctcattgacagtgtcacttgggagaagtggcctaaactctctgagatttactcatatttaaaaggaggaaaccaatatttacctcaaatattgccataaattaaaaaagtgtggtggcaaaaaccttcctctccatgcctgactagatggtaccctctcttcattgttcctatcacctaaaattctgtcataatcacttagatataagtttaaaaaaggagggggaatgggagatatgctctcaggtttgctgctcaagagctaacttttcctctagttctttcacaatgatgctgtcatacaggctgggaagaagtctacactgacaacgcagagtacatctcatatgtggctcttgcctaatgtaccaggcctggaaattgccttagattgcttctgttttctctactgggtgaagctgagtaaaaagtattaaatataagtgctatcccaaagtgctaacttgagtaactctacaaagagtagggcaggagggtgcatgaggggtccagtcaggggctcccaggcgttgtggtggagtaaagcattaagggacaaataggatgactgcagaagaatctctggaaatatgtggagacagttggggccagggacttcattgctgtcctgtcatctgtgtctgtctggtatctgagggtaactgtagtgtggaagtgaaacgggacaaaatggtggtgacagggaagtgatctccagagcagtggtaatggaaacttcttccactcaggcgcttcatagataagggctctttgcaggctgggagtttgtaatgtggggactacttaaagagcaatttttcaatgatatttaaattatttgcaattaatttaaattatttgtgcaaatatgaaatttaaattatttgtgcaaatatgaaattcttctattaatgattttgtcctgagtgccaaggaaaccaagaacaccaaaacaaggcaagactctaaaattatcatttatctgttcctcattctttcagcaatatttaacatgtcccaggcactgagaatataaaatgaaaagcccagtgtctgcccccaggaatatgtattctgcctaagacagtataagacatagtcattcactttttaaaagcatgtatgaatatgcaatgtttgtctttctgtgcctggcttatttcacttaacataatgaggacatagagagtagaaggatggtgagcagaggctaggaagggtagtggagggctgaggggagaagagggcatcattaatgggtacaataaaatagagagcaagaatgaataagacatactatttgatctcgcaacacggtgactatagtcaataataattgtacattttaaataaataaaagagtataatttggattgtttgtaacacaaaggataaatgcttgagggggtggataccccattcttcatgatgtgattatttcacctcgaatgccccacaaatatatacacctactatgtactcacaaaaaattaaaaataagaatatgtgaaatttatgttctaagtattctttctcattaatgtaaaagcatatgtcacccattatttttcatcttctgatttctcaaagcccaaggtcatctctggcagtatttttaagaaattaataataataataaatatttggctcaattctaaacttatagaaccagaatttccgcttttgaggcccagaaagttgcttttttagcagactcccaatgtgatcttttgtaattaaaattgagaactatagctgactttctctttcttaacattgccccttatcgtaagatagacactgagaacttcaaaagcgaaaacagaaaagatcacatctgccatgaaatttccaaatagtctttcttaagtatgtgttgatgcataaactgatttgttttgactgattttatctgtgaggccaatccacaaaacagtcatgtcaatcaaaaagtcatttccttttgtttgcgttttaacattcgccagcctggggcttgtcacagacaaaggttacctgattacattaccgtggcaggcaggtgggtgacttctgtaggagccataccagagacatccatcaaaggagaacttttcagtgggcagatcagtacttaatgaaagtgccaatggctttcacagacaagtttatctggactcctcttaactctcttgataataaacatcccatcttctctcaataaatagtctttcttaatttctaagtaggcaaaggtaatcaggtctaagaggaccaagtatattttttgaggggtgggaagggagaggtacagaagctttgttccctggcatttgaaaggaggaacagggaggctggcaagcactggggtttccaatgtggctcccagaaccaggcaggtacagattcgactctcgcttaccatgccagctggggcattcagtgtagccaagccacaatttcctcattctgaaattgaggaagtaaaaataactaacatttactgagtgcctgtcatgtgccaggtcccctctcactgagtcctcccaatacctctgcaatggagaggacagtatgcccgtttaacaggtgatgaagttgggggacagagaactacttcagagagattttgacggcactaactatgataatgtttggagtgcttaacacagaccttaatatttataaatgctgaagactcctattatgaatttattaaattagccttatttttcctttttaagccctttctgataatcatttcaaaattcacagcccctttggtgtgggcccttgggccagctaattcattaagatacattgtctgggcacagtggctcatgcctgtaatcccagcacttcgggaggccaaggcaggcggatcgtttgaagccaggagttcaagatcagcctgggcaacatgatgaaacaccatctctactacaaatacaaaaattagccaggcatggtggcacactcctgtaatcccagctactcaggaggctgaggcatgagaattgcttgaacccgggagggtgaggttgcagtgagccaagatcttgccattgccctccagcctggacaacacagtgagactctatttcaaaaaaaaaaaaaaaatgcattgtccaaatgcagactgggctcactcttcatacttcaaaggaagaatgcatggagcttctaaagttagttccaggagatagaacctattatctccacagtatatgactctcattacactgggcaggaccagaaagcaccacaaccaagaagaagtttttttctgaaaacagtactaatcagtcattttgactacttccgagggacacatagtgggtgctttggttggttttgaggagctttgggtaactgatccaaatatgagttccattggttggttgctcccagagaggtagagcaagaagcagtgtggcataggaaaagagccaaagctctttcaggtgcttgggagaggaaacagagctggagctgaatcctgatctctttccctccacttaagagttgagtgatcctgggaaagctacttcaagtgctgaagctagaagtacctcatagggttattttggaaaagaaaacaagaggacctatagaaaggttccagcacactgtctgccacacaacagttgctcagtaaataaaaattaattatcatgattagttttattattaagactagctaccaatgataacattgtaaacaccctagataggatggtgtaatcctacgactcagtggccagcatggagagaggttataaaagtatgaactctggtcaggctactgtgtaagtgagtagcatatagagccaactggtttgggtgaccataatcatttattttttctttcattgaaccaaaagtgttgaggctttgggaaagtacaaagcaggggctgcgtctaaagacaaccctattccagttttctttgaaagtttgggcccacagatgtagttcctattaggggagactgtttctctgggcacctacacagagaaagaaattccttcagactgagaagaggatggaaactgtggtcccaaaaatactggaacctgttctcagcctcctgaaatctcctaagtgtactggcaagacctcaacaagcatgcctgcctggtatttctagaggagccagactgtaggaacaaaggaccctaatctcagcaatggtattgcatcccaagtctgccatgaaatagtaaaattgcgagacctaaatgagccctgttggcttacacagtggatttctcagtggtaaccagtgtgaactgaaaacctaagatgacttgctgatacccccaagctttgtagacttaactttcccctacaatcaaggacccacttaaaacagtggggaggggaggctccatgatagccaatgattagattccttgccaacttgatgggatgtggaatgaacaaaagatatataataatattctttgcacaccgaagtctagagtaagacttatatttgcaacatgtgttaaccagacagtcattgaaattgcttgttgaaattggacatttatgataaatcaaaagctgcactatttgggattccctctaccttcctgagaagccccactgggtctcgtctaatggcagggagttatgtgcttcaaccataaatctaagaaatggaactcagtttgtatctctagcacagtgcttctcacacttgagcatgcatcagagtcacctggaggctttgttaaagcacagattgctgaggtttactcccagcgtttctggtctagtgagtctagcgttgccagaaaatttgcatttctaattagtttccaggtgatgctgatgctgttggtacaggaattccactttgataacaacagctgtagaagacaattttacagagacttggtatgaattttcattcaatctaatttttagtgaaaatttcttacccatgtggcatgaatttacattcttgtttcagaacttttttcccctacacccaccctccacattctcctctaagcataattgtgcaagtgggtttcaataaagttctctttttaacacccaatattcacaatagaagtggtgacatcactagataacaatttggcacttttgtttcacttcttagtgctacatgttttttatttgtgtttttctatttttactgttaaagagaacactgaacttgtctctctagcagccgtaagtatcacacagtgaacttgagagttctgcattactgatcaggttaagaaagcagagattggaatctctgagatacatattccaatcattttattttcttcaaatacaacctacccaagtgtcttatctgagtcgattttagaaagctattctgtgtgacaaattgtatccaatttctttcttgtgccttgtagatattctttcatgggctgataaacagagtataaaatctgttacagaaattaaatagtaccgtggttaaaagcatgggctttgctgacagagatacctctgttcaaatttcagccctgtcgcttcataaattaagggtaatctcagacaagttaatttttcctctgtgagtctcagtttcttcacctgaataacagagataatgccttcctttaagttgttgcaagggctgatttagaagacatgagtaataataagcattataaaagaagtgttactgtttcttaaagattatcttttttctaaaagttttagcactctctgcaacctcttaatttttatagtggaaaataaaagggtccatggaaagttagagaaaatttacatgcactcagtattaggagaaagtgctgttattgaaacaggattttcactttttatgataaagtaggtgtgtttgcttagtgtttactcttatttcaatggtgtttgtttgaaccagcattagctaacagaattcacacagttcaaataaatatcagtggactggaaaggacttttctccagccaagtaggtcatgctggaatgctaggttaacatcaatacacaaaaaccgatttggataacaaatcttgctactaacacaaaatattcacgatataaaagtatttgcaacttagatgaggcaaacatggagattatgtatgtatacacacacacacacacacacacacatacaaacaccatatatattcactatattatagtgaaattatttgtaacaatttttatctgcttttatcttttaaatgcagttcataatgttatacataccctcagatgttagtttcatattcacgtgaacccaaatgaatttgttcagatggggcattgaaaacaaaaggaagcgattctggttaacttaacataaaaccaggtgtgtgtatgtgttcggaggagcaaaaaacaaaagcgaagttgattggcaagggtatggggaagtcaccaaactaaaaaaggtagatgaccagaacaggagggaacaagaagtggaattgctcagacatcctggccagcagttggactattcccggagctccaattgcttttccatctgtgaatcattctgctaaaaagggaagagtctagccatctggtctacagtaggtcaagtgctcaccttttgttaaggaggtgaactttgattgaaagctccacgtaagccactgcatataatgtctggtagtggggggaagagagcaggaggggaaaatgacttctcaaaagctcaaagagaaaaagcctgctgttaccacacacagagagaatgtatgctaaaaaaaaaaaaaaaaagtgcaacctgctggtacaaatagcatatacatgtatttgaactagttcatttcacttgggtaaaaatatgccattgtcttagaataagagcaaagaacatctttaaaatacaaccctagtcctcatattatccaaattcataggccaccatgctatgcacgttgagttagctaaaagttaatatttaatgcaaatattcaagatggcaagataaaactcattaaatggaataatattctttcaaaaggttaattattcatactcaacgcaatggctattttggtgtctacttttaatagctgcagcagcaataaaaactttggcaatactgttaatttattaaaggctatagctagtaaatatttaatacagccccaaacattttaatattctttccattaatattttacctaatagttttttctcatataatcaatttaacattttaatccttaatattttaattgatcttcaatttggatagatagaacaggaatttaagttaaatataaaattatctctacaagcaaaagaaaaagttaaaaatatgtaaccccctcaggatatggaaaattactctattctaaaacatatgccataaattttatattaaatgaacactgaatcacagatgtttcttctttcaaatttttaatattcaccaattatatctctccttaatatcctttgacattaaacttaattgaccctggttctgtcaattagaagtacttgtattatttatgggttttatatgaattgtctttatcaagtctttagagcttcgggttacttgcttattcatcatcttctttatcaaatctgcagtttaaaatattgggatttttgaaataatttttaatataataaaacatctattcttgggggatgttgataatggtggaggctatgcatatagcgggcaggggacatataagacatccttgcacctttctcaattttgctgtgtttttacttatatgtatgtatttatatgtattgtaaagaccatcgatactatgaagaaactgcatcaactaatgggcaaaataaccagctagcatcatgacaggatcaaattcacaaataacaatattatccccaaatgtaaacaggctaaatgccacatgcagactggcaaatttgatagactcaagacccattggtgtgctgtattcaggagacccatctaacatgcaaagacacacataggctcaaaataaagggatggaggaagatttaccaagcaaatggaaagcaaagaaaagcaggggttccaatcttagtctctgataaaaaagactttaagccaacaaagatcaagaaaagacaaataagggcattacataatggtaaagggatcaatgcaacaagaagagctaactatcctaaatatatatatgcacccaatacaggagtgccatttatggccacagagctggatctactctctgaggaaaagaggagaaaaaagtagatgaagaaaagttgaggactcagaagcaatctccctgaagtaatttaacaactagaagcttaacagaagaagaagggtcacagacaaatgggcaaaacatgctgagtcatgtaacataaaaactcagagaggtgtgggatcttggcaactcacagaagaaaggaaagagtggtcaactaaggagaccaggaagaaataatcatcaaccaagatttaaagaaaaaaaaaaaaagaaaactccacagagtttcagcaagctgaacacattggctttggcaagtgcccttgatgacactgataatagttattgtagtgaaatggtaatgataacggccaaaaacctggttgaaataagctgagaaaaatagcaaatacacccttcacaggagttttcagtgaaggaagcagagaaataaggtgatagctaacagagatgttcttcaaaatcagtaatattcagtgagcttgaatatacttcaaaaacaaaaagactcctagaaatgtcctagtgatatcaccctaactctgtatcagctatccaatgctgcataacaaattactctaaaactaacttgtataaaacaagcatttattatgctattagattttcagaaatttagatgggcacagtgaggagaatgtgtctacactctagagtaggtattggcaaacgtgtacaggcccagatagcaaatattcttaggctttgcagggccaatggtcactgtcaaattattcaaatagtcgattatagcacactgccatagaccatgcatacaagaaaagagcatggctgtgttccaataaaactttatttacaaaaataggcagtgaaccagatttggcctgcaggctgcagtttgcaaactccagctggagttgctggaatgtctgaggcctcatctggaagacgtgaacactggggagacatgacagctagaggctggaattctgcagctcctcaggtatttctttctatttcaatgggatctctccacatgatcactcatgcatagcagcttcgagttagtcacccttttaaaatggcagctgaggtcttgaaagtgaattacccaagaggaaatgacaaaatcttcatggccttttgcaacttacgttttgaaatcatttggcatcacacataccatattctatttgttgaaatcatcacaaatgtccacccaggtgcaaggggagggacaggaagaaaagtttgcctctttcttgtggggaattgttaaacaatttatggacatgttctaaagctaccatactctctaagaaatgagcaaagagtcaagagaccatttgttgcaataagggatttttaagttttataagaatttgagtgattccaaaagtttggttgaaaaagaaaatagtagtcacacaataatttttaaaagtgttttgggatggtgctgaagagagagaatggctccttataaaattcaattatgactgtgcttagttgcattcagactgttttactaaaaagaagaaacatatttggtattttgtgtttttggtttgtctgatgaacataaaaatgattatctgattcttagaaatactgtataaatgtctttgagcatctaggtatgctgaagaatggcccccaaaaatgttcatataccagaacctgtggatgttatgttagtctgggttctccaggaaacaagaacaaagaggagatacaatccgccgcccccctgccacccctccaccccccgccacacatacaccacatatagaaagagattttttttagaaggaattggtttacacagttatggagccatggagccctgcactctatatttggcaagctagaaagctaggaatgctgatggtattgttccagtccaaatgcaatggcctgagagaggagagtcaatggtgtaagttccaatctgagtctgaagggaggaaaagaccaatgtcccagcttgaagacagtcaggcaaagagattgaattctcccttactgcaccttttattctattcaggctctcgagggattggttgagacccactcacaccggagagggcagtctgctttacttggtctaccgattcatatgttattctcatcttgaaaaaccctcaccgacatacccaggataatgtttagccagatatcttggcaatccatggcccagtcaagttaacacaaaaactaaccattacaattgccttatatggcaaaagagactttgaaggtgtgcctaagttaaggatcttgagactgggatgttagcctgaattagccaggtgggccctacaagtaatcacaagtttccttaaaagatggaggcagaagaagatttcaccacagaagaggaaggaggggatgtgactaaaaaaagcaagaggttggagtaatgtaaggatagggtcataagtcaaggattgtgggtggccccagaagccagaaaagccgaggaaaggattcacccctcagagtctccagacccgcctgtaccttcattttagcctagtgcaactgatttcagacttctggcctctggaaatgtaagaaaataaatctgtgtttgttatgccaagttggatgtaatttgttacagcagccacaggaaactgatgcagcctcctattaggaggttcatgggacacatgaaggtcatgcagttgtttgcacatgacagaagttgcattgacttaagagtttgccacaattttatgatggttaaaatgaaaccatcaatagagagtttgcgtgtaataattgctcaataaatattagttaactaagatatatattaaacaataaaacagtggtgaaaacagaagatttaacaagaaggaaaaggcttaaagaagtagggctgaaatagaaaagtcccaagggaacagagaatggaatctcttcagggagactaaggaatgtatctcaaggtccactgaaggtaggaaggagaaaatgtcttctctcagcacttgagtcaagcccccatcaccagaaggcaggataaggtttggcattcattcattcaaccttgaaggcccaccatatcccaagcacgtgctactcctggatacacatgaacaagcaatgggctgcctccatcctccagtgcacagtgaagtagagttggtcccagcaagtacacatggagggccaagtcctctaaggcgtcctcactaattgaaaattatttccatttcttttaaaataagtgtatgttagatgtcaaactcctaacttcaatgctttaaagatatttttacatgggaagctaataaaaacctaaaaaccaaaggagaaaatattcaggctcatactacttagtattcactttactgaatttttgtttacatcacatctgcaccaactgtcttctggaagcagtatagcagaatgctcaagagcatggagtttagagcagaaatacctggatttgaatcctagatttgccataaattgtatttgtgactttgggcaaaaattactaaatctctgtatgccgcagctctctcatctacaaaacggagatgataatagtatttgccccatcaagttttcatgaaaattggatgagttaataattgttaagcactaacactgtcagcccatagtaagggctatataagtgtgtgttgagtaaaagtattaaaaacttctttaagacccgggagttcttaagaaagcacattcatactctgtaaattgagtaactttttcaggtgacaacattttcctgcatggtattttccttgctcactttccaagggtccccatgacgaatttccacctaccagtcaacaaaagcagccagagctccatcagtgaaagcccagtgaacccatatgttgcaaatgagtgtcagtaatgacaacagcagcaagggtttcacaatctgtgcgtgagaagaaagttcacaaatgcaatcggaaatgaggtactcctccttccacttctaaatcacttcaaaccctttcagactaaaataagtactagggatgtgatccacagctatcacctcggggtggagaagtgaaaaacttactagctttgccagtttgactgtcagagagagctgcattcaaattctgaccccaatccttgctatctacgtaacagacaagttaattaaactttcttaatctgacagggaaaacgttgccactttggctggttttaagtatataatttagcaaatcatacttatctttgactaagttgcagactgtaggttgggtatttagaaattagagcacctacggatcagatacgcccatttatatttttagtggggaaagacatgcagtgggatcccaagcctgtcttttgtgagcctttattgactaagctttctgccttttcctttctaaaaccttttagaaattaagaacatccaggcacttcctttggcaagtctgacacatacacaagggagaggacataaataatttccatactcttcaatgaaagtgaatgtgtaacatataaaacaatgggccaggtgcggtggctcacgcctgtaatcacagcactttgggaagccgaaatgggtggatcacgaggttaggagtttgagagcagcctggccagcatagtgaaaccccgtctctactaaaaatacaaaaattagccgggcaggatggtgggcgcctgtaatcccagcaactcaggaggctgaggcaggagaattgcttgaacctgggagatggaggttgcagtgtgctgggactgcgccactgcactccagcctgggtgacagagcaagactccatctcgggggtagcggggagaggggaaagaatggtggctagtcaaacagtcctttccagtaacaaggtctcaggcacccatctcagaagatttattacatgctgcccccaccattgaccccaaaggagactgactctgcaaacagctcaaatcatagtcatcctcttcatttcctgtgtgtccctcccactcctctcactaacacgtaataccatagccacatcagtcagtggttaggatgctgggttaattttactcccaaggaaagtgacgcctgagagaaagagccatttgtttgtctttttaatttcagcttcttcctaaataagacagccttttagaaagactttcacagtgtcaggttagttacctaaatcttaggtaactttaggttagttacctaaagtcactctgtgacttcatcctgatataaaggaacaaggaagagagtcggattaggctaactcactatggtacatcttattttttatttagtttatatattttgtgtttttagattaattttgcgggtagagtggggcataactcaacatatttttttcctcacaagctggattaattattttagtaacatgagctgtattaaaggggtcatagaagtcaggttagggcaagcactgttatttatgttttacagatggggtaacacatagaaaaggcacggagaagttaagtgatttgcctgtggtcacaaagcctgttagcagcaaacccagaacaagaacctaagatttatgaccgccagttccagctgtttttcttcgtcatgtatcctcagcaatcaacataatcaaaatctgtttggaggtaactgggtacaacaaaataaattattgttccttttgttgggtgaattcagtttgacctggatattaaatttgcacaagtctcactgtctcatttagttatgtctgctcttttattttttaaactatgcttatgactttcagactactgatttgtataaaggaagataacaccgaacaaccaaacaggaagtaatccagcgaatctggaacagcggtggaatttagaagcaaggccaggtaagcacttcaaatatgcgaaaagaaaatgagagagctgaagggacaccaagcaatttgatttgctcttggtttactctggaggaaaaggaatccttctgaattctgaattcccagagccaagccactatattcttctatttcttctgtgtgtcttccagggaaagtgtgtccttgtcagcaccacaatgacactttccatcctgtgacagaaactaagtcttgaaagacaacattgttacactgtttggggagatcacgcctagtggttgttttgttttgaagtgagtggggatggtgaggaggggtttagtgaaggagtaaatgtgaatgataatgtcataaattcccctatgattctgattatgagaactctcctcagagaatctcagttccgtagggaactttgtccaggatctcccaattcttttgagacctcatccaaaaatggtgacttggataaagagaactcaggaactgcatgccactcttcatctaactctgcatgcagctatgttcacattctgctatcgctggctgatgttcaaaaactcagcccaatgataagggttttaaaagtgtattattttcactattgatatagatcttgtggaataatcatttcataatgagccagatcttaactagtagcagactactctagtgtctgctactaatcagacacactctagtttgtggttggtgaagccagagagtgatatcatttcctaagaaacaggcaaggagagagaaagcaattgaagggtgaagagcagagaactatgaagatgattcaggaagaggcacatggagactagaggtaaaacagaagttctgggcagtgaacgaagacatctaatacaaggaaaagggggccagggactgcggaggaaggagtagtttagatttgatcttatttgcacccacagaccagttgctaagggtccaactttctcagggattagatttaacagagatagaaagttagttttcgaagagaaatcttatttattagctaaagtatgtccagtttaattatgtaatgaagatgagtatttgtcactcatttatttgagtatatattttatagataacaatgtaccagagtgtaatagaaagtaccttacagtataactgtagtgatttgaatggcttgtctgagaaggatgtggaaaaaggtcccatatctctcaatattagtacccaagtcagcctaaaaagaaacaaaacattgtaaatatcttggttcctagtaacagaagagattttaaacacagagtcacctaactgagtggaatatttttaatttagtatcagcaccctttcctaaagatgctataaattaagaactctctgattttttttaagccataagtgttaaagagtaatctattacaaatcaagttcagtcccactcttgataacattgtgtttttagactaattttgcaggtagagtggggcataactcaccatagttttttccttacaagctgtattaattattttaaaaatagcaaacatcatgaaaaatagcccagccaaatactcatttctttgcttaatgtctcattgcttggcaattttcttcactgtcattttcaatggaaaaatacctgaaattcatctactgaaattcaactgaacggagtggtttaaaaagaatcaatagacatgctaataataaggaaagcattcaaatgcaatatagcatatgtttctaattaccacttcacaagtcccagttacaaattaagtctcttttatttcaattaacagtctaatggtgcttcagagagataaagaatgttttaaaaagaaaccaaacctctgatgaagagcacccaattttctctccaaggaaacatgatgaaggttttaagctatgagaaaagtctgggataggtgatttgggaactgtattgtccatcacagctaagagatgtagatgatgtttttggtttttggtttttgtgctccccttcctgggaccttctcagccattctactgcccacttctcttctgatatcctatcatgggagagaagtcacccagctggccatgcatctatacaacaaatatttactaagcacttgctttgtaccagcatttaagtacttggtcatgaggattcagtggtatataagatctagtcccttctctcagaaaggttgttgtttagtgggatagacagacatataagctaatagttctagtgtaatgtgtctataacaataacagaatgaaaacatctatagtaaagattgataagttaatttactctaatgtgttacgtcattttacccagaagtttttaaatgaacagaagaatatatatacatatattctctttctttctctctgtgtcatttctatgggtgaaatttctggtatttgtgattaggatgatgagatatctgatacccatagaggtgaccacaaactctgtccataaagctgagcttgttataaattttaatttcaactcagggctggataaattcatagaatgttaagggttcaaggaatttcacagtgtatcttattgattcattttacagatgaggaccctaagacctagagaaactaagtcatttgctcaagaagacaaaggtaatcatcagaaatcaacatgagatttcagctctcctgatccttagtacaacatgtgaaagaagatatgttgtctttactcacagtggaggcatttttctagctgtgtttgatttggcttccctatagattcaggacccataactcttgttctcactcatctgctatgctgctgataaggactttcaggtcaacagctgtaactgctaaatgaagttaatactctggaaaaaaaaaaaaaaaaaaaaccagaaggaacagagaccaaaagattgaaagccatttggaaatttcttgagtggtgtctggcaggtcttttatgaagattatcataaaccaggaaaaaaaaaaaaaacgcctgctgactgtgttatctgtagtgcctattgcctattttggctgattcattgatggtgtaacagataacagaatgaaaggaaatggtttggtttctataaaggaaaaagaatggtttgtataaggaaaccattagtttcctgagattgctataccaaattatcaaaacttggtgtcttaaaacaatagaaattttttctcccacagttctggaggccagaaactcaaaatcagtatttggcggctgaaatcaaggtgttggcagcaccctctggaggctctcggacagaatctgtcccttgtgtctaacagattctgctggctgctggcattccttgacttgtggtcgtatcattcccatctcctcctccatagtcataacgctttctcctcttctctggcatttgcatcccttttataagacacgtatgactgcatttagggctcaccaggataatgcaggataatcttcctatttcaggatcctttgccacatcttcaaagtcctttttggccaataaagtaatattcacaggctccaggttttaggatgtgggtagtggtgttggggtggggggcagatttgggggtgaacaaccagcctactactggtgggtgactggttatccatcattcttaagtcagaaatgatgacccaaaatctctttttgcttttgcttcactcattttgcatttaattactaggctctgcttcttcagacacttttattacagtttagtttttgctacatccctcaaaaatgtcttattattttcacggcctgtcatttagttatgttttcttctaagtgtttggctgtcttggtcagtgctctaaaggaattaaaatcacttggtcagggctctgaagtaattggtcagtgctctgaagtaattaaaatcactgtgaagctgaatgaaaaatcagaagaagaatcaagagacctatgttttgcttgttaggagaactgtgtatcctttatgtctatttttggagttggtggtaatttctggtcaaggaatcaaatgttcttattcctaaccatatagtcagataagatggctaaggtgctttcataatcaccattgattcactgtcagatgggcccgtgctctgtgacaacttttcaatattatagactttaccaaataaaaaggtatctcctcattctgtgcacagaaaaagaaaatgatggatgagtatattagccagaaccctgtcgcagaaaaataagcatgagtgtgccctttcatgcctcctgagaactcctgtgctagacagagcctgttcaagatgtcttttctgactttctgattccagttgacatctaggcatataaggcaactttgtgatggggccagagagcaccacacattgttgtgtatgaaatactctattcagcaaacaagccgtgcagcaacaagacctagtgtggtcaaggatggtggactaaaaaccactatgaaagcagagatgtagccacctctgagactggttttctaagcaggatgacttggttccatccctacaggcatcgtctggtccagttcagcacagagctagctgcaagtgacaacctaagagaaaagtcagcgagaacaaagatccatctcttcgttgactgccttaatccctagagctgtgttcttcaatttgttactatttgctacaatttttctgcctaacaagcaagttctatcctgcctaggagagaaacttttagtaaattcatcttcattcactactattcagctcatgctgtaaaaacttagataatgctgtctgaaatacttaactcctggtcaaatgcagctgctatttcattc

SEQ ID NO: 58 - DNA, 15393 bp, Homo sapiens
gggagggggcgggcgggccggcgggcggggggagccgccgccgccgccgccgctcgatttccgtaattttgagaagatttttttttagtaattttttattctgccccagctgatgtttgagccagcatgtcgcggaggaagcaagcgaagcctcaacatttccaatccgaccccgaagtggcctcgctcccccggcgagatggtgagtgctccggcccgcgccgtggacacacacacacgcactcacactcacgcacactcggacccactcacacgcggctggcccccgcgccccctacctcaccgccgccgcggccccgattgcttcttccactcggcgtaattttttttttctttttaattttcaatgtgcctttgctgggctttcccccgctgccccggggaaagcgagcacatctcccggcaggatctttccggagttgttgggtcctcccgggggaaggagggcgggcatgccggcctggcttctccgtccctgcttttccggggatcccagccgcggccaagacccgggagccccatgaggcgtgggtgcgggtggaggtcgccccggcctgaccgcacggggcccctagcgctcccggcgccggccccagggcacccggcccggcctccgccgcccggccttgctgccagcggtaaggaagtttacttcgggcgctgggctgaactccgagcgtgggggagttcgctgcgcccccctgcccccacgcacactccccctcggcctgcgaggcagaaccgggtgtctttggaggttcagagctgcaagaagatggggactggtgtcggggcgccagcgcctgacccgctggggttgcggccggggtggagagtgctgctggccgccagttgttccggagacggtgcaaacggacggggaaagtgtcggggtctggctcgcaaaatttatctccgcatctcttcccacaacacttgcaccctctgccccccaaaatctttctggtcggtatgcgccctctgcggatcgtggtgctccctacttccaggggggtcagggaagaagtcatagaatagttttccaggtttgcgggtggccagccagagtggaatcccccctgaaacaggggcacttgttttctccgatggaggcgacaactgtgggtcccgaaggggctgaacaagtccagaacaaagtttgtgtgtgggggctatggcagagagtggaagagatccgggcagggagttggggtacaaagggaggacacctggaatccctccttgctcctaaaggtgtttcacggtaccggcctcaaagctcccaggcctagcgcccgaggcggtgtagcggcgcccggactcgggtccccgggtcgtcccggcacgatgctggcctctcggctgtgggaggacgcacaaggagcaatctcggcggggtctcagcggctccggatgccactcgggatgcccacgccctaggcggcattttggggtgtgaaggagggagctgggccccgacagagctccgaagcgtgaccctgatcggcacctcagcccactaagctgcggccgcccgggcccccaggtccccggctcgtttcccagaggcctgcctctcggtagagctggggcacagtgaagcgaagggacccccgctccctttacccctgatgtcgggaaaggggaatcctgacttggggtccctgtaaaaaaatggaggacttgaaattaattaagaaatgctttacaatagccctcctcccggcccccagtgtttcctcaagcttgaatccttacccacggcctctgcgatttctcagtccgctgaaaagagcccctgaaccccgctttccaccccaagcgaaagcgagcacgcggggtagatggaggtgagatgacccaaggccgcagcagctgcgccgagtatttttccgggttttctcagcttagtttcttctgcttcccgcagtcacactcatctttcctaaagtttctggtgagaccttttgcaccggaaaactgttcaggttaacagtttgtacacaaaaaagcaaactagagataagagagcattatatagtgtgttttgtaaatttgtactggttttctacatttaaaaaaaaaaagtctcggccttcgaggagaaatgatgcgtggaagatctttgccttttgccttcagtatcaggaatttttaatagttaagtcttctcataaagcaataatataaaaggagttcactacctcttaccattattctttattagtactatttttttcaatttagtttatttgagctttgaggtaagttaagtaactcaatcaagtttcctttctttctcttttctctccttcttttgatttctttctcttccttcctttcttttttcttcgcaaaagctggtacattgtcctaaagaagcagtaaactgttaggggctccctaggaaacaccccctcccagccttctttcctcacctctccccaccccctcctctttttcttcagtagtaatggttttaggttatgactgtttttacatggttgaacaataagtttgggagaagttgcctagagggtagattttgtaatagggtttcaggatttagtgtgttgtaataatattagtacacaagtaatcctcccccaacgctggacatacaggagggcctaacatactccagttcttttatttgggagtagttctgaaataaatggcattgaaagttcatgacataactcaaggttaccttttaaaagtcaccttttctgcagtgagttcagcaatctcattcttctccccacatataacccatacttctaggagtagctggattttctgttttgttttgttttttacgtaaagaaacattgttatatttttagaaggcaagccccttttcaaacattctgattactttttcttatgtcttgagatggtctttgaaatatgacaaatgaaatatgaaacataccaaattaaatctagttcatgcacttctcatttatcagcacctcagattgtatgacttctacccagagtgagacctagaaaagtttgtagacctaagttacaggagccctaaagaagcagctcccaaagctgaaagcagctagggctgcttggtgttgtgtgtcctgcctgtgtgtgtttgagtgtgtgtgtgcttacaaagaaaatccagaccatgctaaggagccacacagacagcttcatctgaagcaaatgcaaacaaaatacaaaaacaaaaacaaaaatgagtatttggtcgatttcaggatgctggtattttattttactttagtgtacagctgctatgccagaaacactctaaacttggtaatttttctgcttcttatgaaaccaagattatggcaaatatgacttgtctcctaaatgatattcaacaagtcttgaattacttgcagaaagatgactgctactggaaagactgtttatcaagttaaataattctgaggaaagggaatattacaatctaatgattttatatgtgggctctttactacaaattgggatttcagttatgtgttttgtgtgcgtaagtgcatgtgtgcatgtgtgtgtgtgtgtgtgtgtgtgtgtgttggagttcttcctttggtggcgtttttaagattcctgtaacttctacatggatggcccatttagactccattcatttatttaaaaagtattttggtgctcagttttttcaaggaaaagataatattggaagaatgaaacaccatgaattgcagataaaacactaacaatcatatgaagtatcataaaaattcctcttatttatattaataatgaaattctattatttaaccgaagtaatttgctcattttgagcagcttcatagcaacacattgatctctgggcccaaaaggttagcgagaactgtaattaattgctttttttaaaaaaaaccaacacctgcaagataaggcagttggaaagaattcatgtttaatcagagctgttttaagtttgtcataatggaagattctgaatgagaaaatgcaaactgttttttttgtgatttgcttcaggccacacatactttgtaaaatattaaaaaacaaacacataaatgagcaaagtctagttaggcatgagggtagtatgtgtgaaagtgaatatgtgatactgaatgttttgtggtttattttacatcacatttcccctagagttcattggcacaagtgccaacgtataggttcttctttgggggctctatttgttttctttatacttttggaggtagcaagttgtctttaccaacagaaccttttagaaggtagaactccacatttttatggtggagatcttactggggcagaaataggcagactggttaagtttttgaaattgtcaaaagccaagctctgtgtaggaactagaataaactccttctacaacctcaactaggtttttctgagacacttcttggtgcagatagcaccagaatattccaaaaatattcttagattattaaaactgaagtagtttggcaaaagaggtggaaagttaaccaaagaactaacacccctccccccaaaaaagaaaaaagtttatgtgccaggctttagaaaacctagatgtgtcaagctgttttaacctttgctagcctcctcccatgcaaaggtgacaaggtccagatcataatatgtccttcagtatcttcccagtgacccccaaattgaatcctgctagtcacttagcaggaagttagtagtttattttagtttcaccttatcagcttggcgtcttttcctaaccttattcccctgtcaccctcagatgccagacccccaaaggggaagattgacaggtagttcccatagctcagttttaccctcaaacaacagggatttagtttcttgtgcctttgccaatgtttatgtagtcaaagtttagatctcgccttaaggagtctcttttttacgcgtcactgcaataggaaagccacaaagaagtttttgaacaaacccttgcaactggaaccccatctagtgttcagtttgattcatccatgggaaagacattttcccctttcatttattgtgtacattaggtgggcttggatcactattttaaaagcaacgcctcgtccatgttgttattttttcagagatttcacttgtattcttccacaagagaatactctaatccccgtcagaacagtgagtgaacttgaagggtaccaggaaatttgtcatttggtggcatatcacatagaggaaactttagacatcacagaaaatatgcacagcatatgtcgtagtgtttaaaatttctttggaatcctaagttggattcagacttttccatttggattcagacttttcccaggtcgatgcagaaaaaaaaaaaaagaaaaagaaaaaaaaaaaaaagaccaatcaatcaaatatgtttgtgataaaaaaaggaacaggctgttaaaattaaggactcctaaaccactatcatgagaaattctattagggagtgtaaatgcaatcttaagataatgggaagtacagtgaagtgtctttctgaagagctccaaaaaagaaaactaaacctagtagagtaaggtggttgcatttgttttttgttttgttttttcccttcctggctggctaaacctttctgtgtgggacatagttttatttttattttctcagtagacagatatggtagaacacttcaattttctgcttccgactctgcagtttggttcagatgatgaaaaactgacaaatttgaattaggcatcaggtacctaaatagtacaacaggaactaaagcatctgggattttagtataaatttggtggaggtataagatcactcttcccgcccccccaacaaaaggcccagaaaattccaaatatctgtttgtgtgcacatacttagaaaaccactgcttcttaaattttgctatctgactagggttgcttacaaaataatctgtatgcaaaatccatagaaaaggaacaggaatgttattttcaccatagtacaaggaacaaggcaactgtatttactataatggggtcaccagttgcaatcttgtgtaacagattactgagagagatacaagatagcagacaatcagaaaaattaattataacatgttcgtgtgtacgtgtgtgtgtgtgtgtgtgtgtgtgtatgtgtgtgtgagagagagaatgtgtgtgtatgtgtgtgtgtgtatcttactacaaattaaaatattccctttggtaaagagtccaactagtcctcatgttttgtctttttttttttttaagtaaaagactgtttccttggaattttgttccgaatgcagatagatttcaagttaagaattattgcagtgtagcgacacctgcttttgaaataaatcaaaatagataccagtattttggggatgtgggggtgttcataaacatcaggaaattaaattagttcactctacagtgagatcaaatgtcagcttattaaaaatgttgtgaaaacctaagctaaaatatggacaactttttaacacagtctcttaaaagcaagcaggcatttgcatttatttttaaacatctatattttccatccagttagcacaatcctaaatataaaaatgtttagattgaaaaacttgaaaattctcaagtgagtctcgaggcagcacaaatgcagaatttgagtgcaggaaagtaataatcagctaaatcctgtaaagtaaccttccttttattttctctgtatattatgagaatatcagatgtttgcaagttataaagaattaaaatctcttttaatcgtgagcacagatgtgctaaatatttgaagcaactacattgtaatgtgtacaattgatgaagtcagttttctgatttcccttgctagttatttagttctgaatctgtcattatttgtctaagcccagctgaccaagcaaaactgtgttttaaagtggctttatgttttgataaatgtgagctggttgaaaagtattttccactgaatgcagagcttaatagaacatgctgacataatagttttaatgcattttgttgaaaatgtgtgaacaaacagaatagcttttgttccttcataattggctgtaaaagtagatggaaacataaccattacatatggaaatgtgcaaagagaaagaaataacatttctgttgaatatattaggaattgcatttcctagtttaaaataagcatctgaaatggatgcatcatttaaaattgattgtcaaaataagaagctttaaagagaatttttgtcacattatttttgtcccaagttaagcaatataacttcagcaaatttcatctaatattttgtttatatgattttaaggcaggggagaagcagaaagggcttaaaacagcaccttccatgtgcataggaatccagtgccaattagaatgcttaaacattaaattaaaaccaaatcattattggtattttctgctgcaactaagatttgtttggtggtgttaatgcatcttgcactatgcccttgtggagattaaaagatgggtattaggaaagctagcttgttaagtataacttagctactcaaataacactcccagtgaataaagtgtgcgtacgtttggcatacttcaccagggattctaatcaacttcggcatcactcaaggcaaatagagttaaggaatttccagaagttagtatttaggtattaattttattttctggaatgcaaaactagtcaagtttttaaaaatgtttactacaaaaaagcaaacagctgaccctttccaacggacttttaagtttactgaaaaaagcagcattttgattttacatttattcatatctgcaattactttgttttctgcaagttttctgggagattcaatttggaagtcatggaaactacctattatctgattcagttctgcagaaaagcatgcagggaggtaatccttgaattaaacagttttttttttttcttcacagccttcgtagatgaccacacaccatttgtacaacagaagttggtgttccccatgctgggcaaacaatgggaagccatcctgtctttgaataggatgttagcttggagttagagatttttctgtttaatttacaaatggatcttagtgagaagacatctgagcaaccaatggaaacaaacatgaaataaagggatttttataataaaatgttcaggacaatctgttaaacgattgataacagttaagagcaaactgtttttaaaggcattcagacaaggagagctgcaaagcattttcaaactctaaaccaagaattatttcttaggagatgggagcacttctcaactgcacatccttcttgaagttgatgtttaatcagaaatgtaaatcttgtgccagtttttatagacatagagagcacttttgatgaaatatttagaggcataatgttgccattcggagcatggtggcatatattctttgattagtggaatggtagccggagttacatctttaattttaaaaataaacatgccatggggtgatatataggtgccaggcaagccttgtaatggattaggatcattgtgtttctcttcattgtgtgtgttgccatccctttgtgttcaagtgagttttgaggaacggtctggaggatttgttactgatgtgactaaagtgcgtttgtcagggatcagacttagcgcaggttcgaggtaggggcttgaggtgattttcaagttgtcagtctacagcttggtgatatgcatttttttcccccttgtcaacaactgattggaacctgaatgactacaaattagtttagtgacagaacaaactgtcacagatatctttgagtcggttgaaaatgaataaggttgacagaaactcaagagcctaataagtcctcagaatggtttgtggaccctctccggacaagtagacaataaggtgtataaaagattggaaatcaatattttgctatggaatttcatcatgcaccaatgtctcccatttgtagtattttatattttgatgaattatatgaaggccatgactctctgaaataccggatggataggaattcctccatacccttacaaattaattatggatgttcttaggtaatattgattggttttcaagggctacagttttgagttttgcaggtggaaaaccattgattagcctttttttttttaagtcataggtgactgtgtgtcctggccccttttctaatcctgcacctttttgacatttgtaggagacacagaaaagggtcaaccgagtcgccctactaagagcaaggatgcccacgtctgtggccggtgctgtgccgagttctttgaattatcagatcttctgctccacaagaagaactgtactaaaaatcaattagttttaatcgtaaatgaaaatccagcctccccacccgaaaccttctcccccagcccccctcctgataatcctgatgaacaaatgaatgacacagttaacaaaacagatcaagtggactgcagcgacctttcagaacacaacggacttgacagggaagagtccatggaggtggaggccccggttgctaacaaaagcggcagcggcacttccagcggcagccacagcagtaccgccccaagcagcagcagcagcagcagcagcagcagcggcggcggcggcagctcctccacaggtacctcagcgatcacaacctctctacctcaactcggggacctgacaacactgggcaacttctccgtaatcaacagcaacgtcatcatcgagaacctccagagcaccaaggtggcggtggcccagttctcccaggaagcgaggtgcggcggggcctctgggggcaagctggccgtcccagccctcatggaacaactcctagctctgcagcagcagcagatccaccagctgcaattgatcgaacagattcgtcaccaaatattgctgttggcttctcagaatgcagacttgccaacatcttctagtccttctcaaggtactttacgaacatctgccaaccccttgtccacgctaagttcccatttatctcagcagctggcagcagcagctggattggcacagagcctcgccagccaatctgccagcattagtggtgtgaaacagctacccccaatccagctacctcagagcagttctggcaacaccatcattccatccaacagcggctcttctcccaatatgaacatattggcagcggcagttaccaccccgtcctctgaaaaagtggcttcaagtgctggggcctcccatgtcagcaacccagcggtctcatcatcgtcctcaccagcttttgcaataagcagtttattaagtcctgcgtctaatccacttctacctcagcaagcctccgctaactcggttttccccagccctttgcccaacatcggaacaactgcagaggatttaaactccttgtctgccttggcccagcaaagaaaaagcaagccaccaaatgtcactgcctttgaagcgaaaagtacttccgatgaggcattcttcaaacacaagtgcaggttctgcgcgaaggtctttgggagtgacagtgccttgcagatccacttgcgttcccataccggagagaggccattcaagtgcaacatctgcgggaacaggttctccaccaaggggaatctgaaagtccactttcagcgccacaaagagaaataccctcatatccagatgaacccctatcctgtgcctgagcatttggacaatatccccacgagtactggcatcccatatggcatgtccatccctccagagaagccagtcaccagctggctagacaccaaaccagtcctgcctactctgaccacttcagtcggcctgccgttgcccccaaccctcccaagcctcatacccttcatcaagacggaagagccagcccccatccccatcagccattctgccaccagccccccaggctcagtcaaaagtgactccgggggccctgagtcagccacaagaaacctaggtgggctcccagaggaagccgaagggtccactctgccaccctctggtggcaaaagcgaagagagtggcatggtcaccaactcagtcccgacggcgagcagtagcgtcctgagctccccagcggcagactgcggccccgcgggcagtgccaccaccttcaccaaccctttgttgccgctcatgtccgagcagttcaaggccaagtttccttttgggggactcctggactcagctcaggcatcagagacgtccaagcttcagcaactggtagaaaacattgacaagaaggccactgaccccaatgagtgcatcatctgccaccgggttctcagctgccagagcgccttgaaaatgcactacaggacacacactggggagaggccctttaagtgtaagatctgtggccgggctttcaccacgaaagggaatcttaaaacccactacagtgtccatcgtgctatgcccccgctcagagtccagcattcctgccccatctgccagaagaagttcacgaacgctgtggtcctgcagcagcacatccgaatgcatatgggaggccagatccccaacaccccagtccccgacagctactctgagtccatggagtctgacacaggttcctttgatgagaaaaattttgatgacctagacaacttctctgatgaaaacatggaagactgtcctgagggcagcatccctgatacacctaagtctgcagacgcctcccaagacagcttatcctcttcgcctttgcccctcgagatgtcgagcatcgctgctttggaaaatcagatgaagatgatcaatgctggcctggcagagcagctacaggccagcctgaagtcagtggagaatgggtccatcgagggggatgtcctgaccaatgattcatcctcagtgggtggtgacatggaaagccaaagtgctggcagcccagccatctcagagtctacctcttccatgcaggctctgtccccgtccaacagcacgcaggagttccacaagtcacccagcattgaggagaaaccacagagagcggtcccaagcgagtttgccaatggtttgtctcccaccccagtgaatggtggggctttggatttgacatctagtcacgcagagaaaatcatcaaagaagattctttggggatcctcttcccttttagagaccggggtaaatttaaaaacactgcttgtgacatttgtggcaaaacatttgcttgtcagagtgccttggacattcactatagaagtcataccaaagagagaccatttatttgcacagtttgcaatcgtggcttttccacaaagggtaatttgaagcagcacatgttgacacatcagatgcgagatctgccatcccagctctttgagcccagttccaaccttggccccaatcagaactcagcggtgattcccgccaactcgttgtcatctctcatcaagacagaggtcaacggcttcgtgcatgtttctcctcaggacagtaaggacacccccaccagtcacgtcccgtctgggcctctgtcttcctctgccacatccccagttctgctccctgctctgcccaggagaactcccaagcagcactactgcaacacatgtggcaaaaccttctcctcatcgagtgccctgcagattcacgagagaactcacactggagagaaaccctttgcttgcactatttgtggaagagctttcacgactaaaggcaatcttaaggtaccttgctctctctgcaccatacctgctccatcaaccctgtcccactgccattgattatctataatgcatgcccccagagtcatcagcccagatattcagggagagagctcttgcaagggaacctgctgcacatggttgacgggggagaaatgggggagagggtgcctgggagggtcaggatcatggcagggacaagggcaagctgcagctcactgaatgtcagtgcacattgaataatttggtacctaagcgaagcagcggcctctctctgttgtctcgctaagtgcaccaaatgaattgctttacctaccaagaaagcctagcgttgccatggggtattgattaaagacctccacgtggcctgtgtgctgcccgtatcacttaataattagggttctcggcgtatgtatctatttttcataactatgcagtccagcatggtttgtttgtctaaaaacaataacgtcactgctctgctaatgggtattatgataattgattatacagcatttcctactgatatgtgttggaaataaagcaaatatgcttaagttctagagcaacagttgagtgctcttagtgtgtacatttttctgttgacagagtatttctctggagattgctcccagtaatgtgagatgaataattactttctggcttttctctccatacgcaggccctccaatgggcaatcagggagggataccttctccccatctgaaaaggacatttatagggtaaagggtgtcagatacaatacttaccattgcaatgagagtggacctaacaattctaaccctgaaaggagctatccgccactgcctggcttgcttgaggccattataagctaaatatggttaataaaaaaagagtaagtaaggcatccttgccttggaagaggggagacagcccagggctgcagagagtgaacacgttattactagacaggaggaatggatggttcctgttgccttcactgtctgtcacatgatgagaatagacatttaggccacttgctttgtggacatttgggatatgagttgagacagattcagctattaagcttctctccccctcctcttttttttctctctctctctctgtctctctgcctgccctccccatatctcaggtacacatgggcactcacatgtggaatagcacccctgcacgacggggtcggcggctctctgtggatggccccatgacatttctaggaggcaatcccgtcaagttcccagaaatgttccagaaggatttggcggcaagatcaggaagtggggatccttccagcttctggaatcagtatgcagcagcgctctccaacgggctggcgatgaaggccaacgagatctccgtcattcagaacggtggcatccctccaattcctggaagcctcggcagtgggaacagctcacctgttagtgggctgacgggaaacctggagaggctccagaactcagagcccaatgctcccctggccggcctggagaaaatggcaagcagtgagaacggaaccaacttccgcttcacccgcttcgtggaggacagcaaggagatcgtcacgagttaaagcagctcgggctggagacatagcattcattcctgttcagaatgcgacctatggtggcctcctactccttgccccccaccccgccccgccccttccttctgttccccagatctatgaactacaacattatgaagacattcttttgtaccttgttcaactttagagttctaagaaagcttatttattagcgatataaccttgctttgcaaacagaatgcaagcgttaactttggtcttctgtattttggactaaatactaattgactagagtgctgtaaacttgctgtaacatttatggcaattgcaagttgccctgctaggcagttgtaatctggcattaacttattttctatatccagtttaatatgaatctggtgttgatgcaatgcctcagtgatgcattagatctctaataaagtctgtatatacatgtacactttgatcctgctggaaaattttatcagcaaacacattgtctaatctttcaaaacagatttaaggaaaggactgaaagtacagactgaacagtgtggttctttgaaaggtttggttttttaatttttattctaaaattcaacctttttttttgtcgatttaaccatttccattttgaactgctatttgtattgtgctttttacttgagtcgtcttcaatgttaataagtttctgtacagtaataagcacgcagaattctttagagaaaaagaaaacaagcgttgttttggtagttgaaactgagacgtaacattttgccttgtaggtatattcacgatagaaaatgtgtgctggaatttcacaatgctgctaagtatagcatcttgaacaaccttcagtggagaaaatgtagatgctcttgtatatacaataagaaatatcactttcattcaaatgtacatatgttccttacaagagcaaatgcttcttcttgatcaagagagcaggtatagtgtttgtttattttgtcttaggtatggaagaaaaaaattggactgttacatgcactttcttggaaagttgaaaggaaagggggggtccaatttctttaacatttaatacttactaacaacagagatactgtaattttactcaagtaatcaaatacattttttttgcaacagataaaacaaaatactgtg

SEQ ID NO: 59 - DNA, 24314 bp, Homo sapiens
gcgctgcaccacggcggccacctgctgtgcggttctgagggcttccgcggttctgagggcttccgcgtccctgccatgcccatcttggggcttcagaagccaacacgatggttttcgggctcacatcccaaaggctgctcttccttttagcacctgggacctaccaggaacctcaacctctaacaacattggtccccgttaccgtggagtttgcgcccagcgttcgctggagggccgtttgaagaatgattgttgtcgtaaaggcctttgataataatagatactgtttacccagtgcttgatgccaggcattgctacaaacactgcgtacacattattctatttaatcttcataacccagtgaggtaggtactgtcattactgtcctttcacagaagaggaagctggggcacagaggttaaatgctagtgagagcagtaccacacttggcactcaggctgcccccagagtgtgggcacaaccaacgcagggctatgcctgggctgcaggcaggggaaactgaccgtggttcgctccaggcctcagccacactgcagttcactcccacaaataactgaaggactttccctgggtgtctcccacagtgtgctgggcgcagtggtgcagtggggtgaggacaacgcacacaccagcaacctctctagcagctcagtccttttagatctccatcttccagatctagaaaaaatggactccacgttcgttttcactggttcccgcttggctaatccctggtttttctgtccagatctcgcctccccatccgtgattttgtcatctttgcctctcctttttcctcttctccaaccggtccctcagccccagaacctctgcaggcacctcccaagttctgtggtctattgttttcaagggctgctggaacgaagtaccacacactaagtggcttcaacaaccgaaatgtatggtctgtcctggttctggagactagaagtacaaaatcacggcgtgggagggctggctgcttccgaggcccatgaaagagcatgtgtgcccggccactctgacttgcagatgcccatcttctccctatgtctcctcacaccatcttccctgtggtgtgtgtgtgcaaatcccttctttctataaggacaccagtcatactggactagggcccacccgaattgcctcattttaacttgatgacctctgtaatcatgaggtaatgtccaagtaaggtcccattctaagatacctgaatgcccaggcacggtggttcatgcctgtaatcccagcactttgggaggccgaggcaggcagatcaactgaggtcaggagttcaagaccagcctggccaacatggtgaaaccctgtctctactaaaaataaaaaaattagcggggcatggtggtgcgtacctgtagtcccagctactcgggaggctgaggcagaagaattgtttgaacccagggaggtggaggttgcaatgagccaagatcacgccactgcattccagcctgggagacagagcaagactctgtctcaaaacaacaacaacaacaacaacaaacccctgaacatatgaacttggggaatgtgggggtgacaattcaacccgtaacatgtggatggtcgtcactggctgtctcaccttacgtcttctcctcaagacacttttcttttaaactgggtgcctctccctgggctctagcccttaatgaggtgatttccaactcaaggctgggaaaggcacacaacccagtatcagacctgagttcacactccttctggcaggaacttctaggtgacattgggaagcaacttcattccttagaacctagatttctcctcaggctataagggggcttggctaaataatctcttaggtctctttcagcacacacacttaaaaaaaaacaaaaaagtttttatctaatcactccaaaaagttttacaatgtatggggttgtcttgtggacttgagatagagactttgatgggaggcagtattgcatagtggttaagaacacaggctttggggtgggtgaatccacatcaagcctcattgcatcctccttaaatcaggaataatacctacctcagacaggtgtcataggattgacagccacgcccttggcgttctcattaaatgaagattccagactctatagttgggagtttgtgacttaggtaagaaaccagtctctttttttgagacggagtctcactctgttgcccaggctggggtgcagtggtgcgatctcggctcactgcaatctctacctcctgggttcatgccattttcctgcctcagcctcccaagtagctgggaccacaggcacccaccaccacacccggctagttttttgtatttttagtagagatggggtttcattgtgttagccaggatggtctcgatctcctgacttcgtgatccacccgccttggcctcccaaagtgctgggattacaggcgtgagccaccgcgcccggccttttttttttttttttttttaaatgaaggacatgattgtttttaaaaattgggccaggtgcggtggctcacacctgtaatcccagcactttgggaggcaaatgcaggaggattgcttgagtccgggaattcaagaccagcctgagcaacatagtgagaccctccgtctctaagaaaaagtttttaaaaattgtgtcacagtgatcacaatgaccactattcacatcataatggcttttcttttggctattaacactgcagtgtttttgtatactgaaatgtgtctgtgggaccaacagcattaaagaataaagatcctagatgaaaataaacactaataatcctggtgtcctctccaatagaattaatctaaactccttatgaatcagtagcattataatgttatgtagttatgaggaatagaattcttttagaagcaggcagcatgaacttatacttccttgtacttacttctttaagaaaccagtcttaaccctcctttctactgtcttttttttcaagcatctctctagccaagggaataagagccaattggatattgtagtggtgcaaatttcctagcggaaatttgagtcttttttcggtcactcctgcccttgttacattttggcctgattaaaatgttgtggctaattctggctaaatccacattgacatctgcctaacaccgattgatcaatctcctggagaagctaaagagaactgggccgggtgcagtggcacatgcctgtaatcccagcatgttgggaggccaaggtcggcggatcacttcagcccaggagtttgagaccagtgtgagcaacatggcgagatcctgtctctacaaaaaatacaaaacttagcccagcatggtggtgtgcacctgtagcctatagtcccagctacatgggaggctgaggtgggaggatctcttgaacccaggaggtcgagactgcagtgaaccgtgattgcaccattgcactttggcatgggcaacagagcaagaccacatcaaaaaaaaaaaagaaagaaagaaaagaaaaaaagaatcgaagtctttctgggtcaagctgattagcaggtttacagtggccttgtctcaaaagttcccacttgtgattaggaactacaaagctgtgattattattaatcttctgcacctattgcttttgagcatggctatctgaagtatagccacatcaattaataatggccgatgagcttttaattacagacctcggtaattggctggttaaaggaagattggcatcagtaactgagttctttttgttcaatccattttgggactgcaactatattaggcatacatccatgcccccatgaaactgtaagggactggaaggaggcagtgtgtcccgtgaatcctcatgaaccatcccagtctttcttactcccctgcacgtcctcttcatttacacagagtaggtattcaattgttgagttggacacatttttctaactactcgatgtcaaccaagggtagatccacgtttggagccttaaacttacacagtttagggaacctctataagaaaattacaaatacaaagttggatacaaaagtgaatgtttcctttagaattagaacagaaatcacagtaaactacaaattttaaaagtttgggctttctagggcctccggcagtagggaagggaaaaaatgttgcccacataattgcaatcataaatttcacaaaatccagaaaaaaatcacctaaaaattttattaattcttttttcctaccactctaataagtttttttcctgtgttttgggctgtgtactaatgaatgttttcttcatgcgacattttaaataaactttataaaacagtttttgatgtatagaaaaattgccaagttccataaaccccccacccaatttccactgattaacatcttagattaacatttgtgatgatgactgagccaatattgacacattattataaccaaagcccatccattgttcagatttcatccgtttttacccagcgtcctttttctgtcccaggatatcaaccaggatatggcattgcattggatcccaaccaggatatgacgttacattggatcccaaccaggatatggcattgcactggatcccaaccaggatatggcattgcactggatcccaaccaggatatggcattgcgttggatcccaaccaggttatggcattacattggatcccaaccaggttatggcattgcattggatcccaaccaggatatgacattgcatttactcatcacgcctccttaggttcctcttggctgtgacggtttctcagactatccttgttttttaggaccttgacagttttgaggcatactggtgagtgttttgtaaaacatacttctattgggagttgtctgatgtttttcttacgattagactggggttataggtttttaggaggaaggccacatgtgacatttttataatataattttctacaggaagaaaattcggacttttctctaccatgattgatgggcttttcttacattgttagttttgattcaaaatcaaaactatgtggatgggtaccaaattcattgcttttcattttaaatgaatgctgattggaaaaattttcagtggtaaacctaccggctatgtccatttcactccgtgtttctcttcccctgcccatctcctaagatgccttaggagaggggaaatatgatctctggccttgaacctcctgccaggatgctagataagttgacagagagggtggagaaatatacctgaaggcattcctgtgcggagaaagctagagctatacatgcaagtccctgtgaattccgtaactacatctccccagacccaaagaaatgtatgttcagctccagctcttgttagctgggttccaaagatgaccttggtcacttcagcaccataatgggatgaggtggtgacagaagagactttgcatagagtgcaccaactgtgctatgtgctgtatcaactgattgcagctacgtggtcttacttttgcaaattttgtggaaacatttaaccatgtgactaggttgccagagcccctcccgaggtctcacaaggggcttctataaatgagaagccctaaaaatcaagctatgtgagcctcgcaatgaatctactcccgttggcaatgctttttgcaccgttatgatgccactgcttggacttgctagttcaactctcctgggcttcagcggtagtgaagaagaagcatttccaccaggccgacactgttctaacactactgataattatcctgtggtcttcagtggccctaatgaagtcatagtccctttctccacaccccttttagttttaacatgcacttgatccactggcttcatccactccatgtgggagaacaatccacagctgcttaggccgcagctgcccagggtttcccctctcttttctgggttggaggactccagctctcccagactcactgctcaggccttctcctggcattgcagttctgccccaacacagagctgacaaaccagggcgtctagaccccaccctgcgtccccacagcactctatttttttgttcttggaagtgatatgaagatcttatgtagtcaatgtcaaaaagaaatgataattacttcatttttcccactcaactggccacttattcccaactagtaaaattcaacctctgcaagggtttctaaggcacccttcataacctgaccctgctttccccgccaacaagttcatatcattttcctctccagctatctgtagtcaagagtaaaaagtctggagtcacacaggttggaaccaattccactactcactagttcagacccaaggcaagtaactgtcaaatccctgtctttcttatctgctgagtgaatataatactgtattgcatcaaatctaaatcatcaattgtaagatgcactattaatttatgtagccctgataaagaaaagaatttctgctgattttaattgcaaaacattgtcctttggaagatgcaccctctatcaattcgcttttgctgtatgacaaatcacaccaaaacttaatggcttaacaccacaatcattcattagctcatcattctgtgggtcggcacttgggctaggttcagctgggtggttcccctgctggtctctcttaggctcagtcctgcagccaccaatagctggtggatcagctggggccagatgctctgggatagcctcatttacatgtctgatggttggctgacaatttgctgaggctcctcagttcttcacatggccaccctagcaaactagctcaagcgtgttcaaatagtagtgtcacggctacaagcacagcaaaggggacaagcctcagggcataaatgcttttcaaaccccttgcatcatgtttgcgtgcttgaatccaggcagtctggttccagaccctcgactcttaacctgcagagagttccgtcttactggagaggggaatgagagcagggatgggtcccgttggctaaagcaagccacatgaccaagtcaagactcagtatgggaaagagctactgaagcacatgggtacgaggaggagaattttgctggttattttgcaatctacccacatcctgactgtgtacataaaaaagtctgaagaaatttgtactaagagtgcacaagtactaagagtagtagtgcttgcctcaaagagttgagtagtagggctctgtgagataatgtcagtaatatcacttagtacagtgcgtggcccctggtcaatgttctgtacgtactattactatcacatttgtgtccgtgcttctttctaccagaaagctggtaaattcatgtttatcctcccaatcctaactcagacatcactttccctaggacacacacacaatttgttgctcccagagctgtgccaccctgtactttacacacattgcctttgttgcagcaggttgtcattcttgtgcttctgtgggcctggctttgggctttttggtagcagatattctgtgtctagacaccttccatccccaatacagtgcctggcacttgatatgtgtttatttaattgaagtgacatgttacttccaatagaacttcttctcattcccctgggtatcatcttcctttcctctggggatgctcccacagcaccctaccatctttctagtgtaggacttgtgacactgagctgtgatgacttgtttgcgtaacatgcacacataaagaattttccttatttctttatattacacagagctccccagtaccatgactagcggtagcagcaaatactctataaatacctgttacatttatttatttatttatttatttatttatttatttttgagaccgagtctcactctgtcacccaggctggagtgaagtggtgcaatctcagctcactgcaacctccacctcccggttcaagtgattctcgtgcctcagcctcccgagtagttaggattacaggcacctgccaccaggaccagctaatttttgtatttttaatggagacagtgtttcaccacgttgactgggctggtctcaaactcctgacctcaggtggtctgctcaccttggcctcccaaagtgctgggattataggcatgagccactgcgcctggccaacacctgttaaatttagaaaacagagttttcaatctctgtcttacacccaagaaggcctgtggcccagagatccggagtaaaattagattcagtatttaatccatcaatagctcgttcttactgcatccctagggtatgaactctgctgacttttctctcctctttagatcacaacccagtgacatcaccactacacagagaatcattgcaggccctatccatgtctccgtggtctctctgatcccccacccccaccccaacacacacaccacgcgcgctcacaaacgtcagtattttatgtgagtagagtgtgtctataaataccatggacagtggatgggacttggatcaggtcttttgtcaccctatgataccctatgggggcaggaccccaggaccccatagagttggtatattggctcggagggatgttgaaactgtgagtggaacaacataccaccatcctccacttccatttgcaccctctacttctctcctgcagcaggctgacgccggcccagagcctgcatacagccacaagctcacttctcagccttttggaggccatgcaccaccttgggaatgcaatggaagattcagaccctcctcataaacgtttcccacatgctttctatgggttccctggggtccccagttaagagccctggtggaatagaaagggcactggatttgtacttgcagagatctaagttcaaggtctgattctacctctcactaattctgtggctgatctctctgagcctcaatttctacatctgaaaatgaggtatagccagcactgcaggttgtaaggggcctgctacgtgataggtcctcagttttgccttccccgtctaagcctcctaggtacctggttaccatttgcaagagcctggagctaacaggtggaagtttcattccaagttcaggtcttcatgcaatcacgtgaaaccatttactgagcatttattatgtgctagccacagtggtaggtgctggagtatgcaagtgtgtgtttatacctggctgtgaaaggtatacagaggtgaacataatatgagacctcagggagctggtagtatgatgacctagtgcccatctatccacagaatgcaatttgcctaaaacgtttagcacaaaatgttttacctgattaacccactacaaagacatcttattattgatacctccagcgtttcggctatgggatcaaagtctggcctatgtttgacacccgtatatctctgtgaaaatacattgtcttcctcgagtctattaaattcaatgccaagagcctccattagggatattcttgtgtagtcaaaattgagtgagatgtctttggcatgaatatattgaatgtacagcttttgaaattagttcactatggtaaatatcaatgttttcactgactgaataaaattgattataatattgcactctacacagctaaagattattaacttttggggaaatgattttttatcatggctaaaaatccatttttaagatgcttgtcaggctgttcttttcagcatagttctcaattgaaaatgtagacagctcatggcattgtgggcatttgtgctcactgctgaacacatttgaatacctctgctctcacagtcttttcttcaagtcaaacagtctaccagaatgcactaagctcccattttgccaagaagctggctgtttgagaataatctggagagattcctaaagactttgataagtgtaattttttgaaagctctgtctctctggtgtcattcctactgaggctgctcatgtcattcaggttccataatttggatgttaaatgaaaaaaaaatgaagcacagtggtctagtttacaatttaggttaattggcctacttcaatgtatctcattttcaagtattttcacctttactatgaactcctacttactgagcacctactattttgtacagttctgggccaggaactgctgtgagtatgagacacctgccttctcgattgtaagcaacagaaatccaccatgagcaatatgagtagatatagaattcactgaaaggaaattggagactttcagagactgaaagacctgagctggtgtgtggtccaagaagcaggaagaagaaccacagccatctcttaacaagaacaggctgctcagaagcctgccggccaacacagccacagtaactgctaccaggctgggtccactgcaggccacagctgctgcacaaggaggttccagccctccttttatctttgccgcacgcacccgggagtcagaattctaggcaagagctcctggttgccagtctttggtcctgcgcctgtgccctggctgctgggtgtggagtgaggaaaaggatgcctttgctttgttgtctgtagttgcagagagggtgacatgacccctccaagtaggaagaggttattaaatactggatagtaaaatatgacaaagctccaccacattctttgttcaatgataagacaagtactagcattagaattagtttagacaaagggaattaaatttttttttttgagtctcgctctgttacccaggctggagtgcagtggtgcgatctcagctcactgcaacctctgcctccccagttcaagcgattctcctgcctcagcctcccgagtagctgggatgacagacgcatgccacaatacccatctaatttttgtatttttagtagagacagggtttcaccatgttggccaggctggttggtctcaaacgcccgacctcaagtggtctgcccacctcggcctcccaaagtgttgggattacaggcgtgagccactacgcccagtgggaattaattatttactggagaaataatggtaggccttcaaaataaaattttgaaggaggaatgggtaagaattaccatgcagataatgataagcccaggcataaatgtggatgtatacagaggcccagatatatgagacagcatagagggtgaggttggaggagtaaagaaaggagacagggcagaattggctgcccttctcagccagcttagaccattggacagtggtacggagacacactgagcagttttagacagaggcaggtcacatttaccttttagaaagctcaccttggtccctgtacggagagtggatggcaagaactggtgtgggttgcggtaagccaggctcggggagaccaggttttctcattctggctttttctccaattagctatgtgatctggtctccaacttgatcttaacctgtctcattattttcatcttctaaagtgctttgattggaaaagacaattctaatgtggtccattctaccctcaaagtttagactttgttactgtaaaggcaaattggagtatgattattaaaaaaacttaagttgcaggataaattatttgaactacttgtttacttattcaacaaatatttttatttttattttattttatttttagaaacagggtctcactctgtcacaggctggagtacagtgtcgtgatcataactcactaccgcatttaactcctgggttcgagcaatcctcccacttcgacctcccaagcagttgggatgacaggcgcatgccaccacatcctgccaagttaattttttttggtaggggtgggtagagacaagggtcttgctttcttgttcaggctggcctccaactcctggcctcaagtgatcctcccgcttaggtgtctcaaagcactaggattacaggcatgagccactgcgctggcctcaacaaatatttactgactattatttatgtctcaaaacactaggattacaggcatgagccactgcgctggcctcaacaaatatttactgactattatttatgtctcaaacactgttctaggcttcagaggattagcagtaaataagaaaagtccttaccactatgtgaggtcttttgaatgagaactagattctagcaagaggagtggggggcagtcaacaataaagaaacgactgtctaatgatataaggtggtggtatgtgctataaagaacaaagcaggttggggggatttggaagtgactggagagaggcaactcttcataggctggcagggcggcctctcaaagaagtgaaagagattttaaacagagattcaaatgaagggaggaatcaaatgaagataggcaggaagaattttccaagcagaaagatcaaagaaatggcaagtgggaaggtctccaggcatgtgaggggaagagcaggcaggtcagtgagggcggagcacagaagagggaaaagcaaatacaaaggctccgagtcatgttgaagagaagacaagaatatctacatgacgtcatggaggggccagaaaagggtgacgagagatgacttcagagaagtggccagggaccaaccttcattcatggattgttgattgtttcattctttcagtgcaagaggcactgtgctaggatctgggaatgcaaccatgaactggccatgccttcaaggagctgaaaccccttccaaggggctcagaagacatcaaacgtgtcttttttttttttttttttttttttttttaagacagaatctcgctctgttacccaggctagggtgcaatggcgtggtctcagctcactgcaacctccgcctctcgggtttaagcaattctcctgcctcagccccccaagtagctgggattacaggcacgtaccagcacacctggctaatttttgtatttttaatagagatggggtttcactatgttggccagcctggtcttgaactcctgaccttgtgatctgcccgcctcggcctcccaaagtgctgagattacaggtgtgagacaccacgcctggccaaaagacgtcaaacgtatcttctctcgtcaatctttctttccatgtctccatagcttgccaactctcctgcagtcacacttttctggcccattgagcttttgctaaggatgttggctttgcctgggtttgcccttgttatcacctcatacagctaaatcttccttagcctgtaagattcagctcaaatgccagttccttgaggaagtttctaataccccagactgcgagaagtctctactgctctatgtcactcacccatttatctgtccatctgtctattcagccatccttccatccatccatcaccttcattgatcttttcccctccagtcagtaacaggcctgtcctgggtaccactgatgccacagtggacaaaatacaatcttgcctttgagtaagtcagaaagcaatggcaaagtcagacaagaaaatgaacttgaaatatagggaaatattacagtgaattattgtttaacgggcactgctgtttgttcaatgtcatatggagcacaataaataataacgaaaagtgaaatatcaaatcctgactttaagcatggctcctgttttacaaatggagtttgtaaataatttttcaatgtataggatagatattaaatattggcttatcaaagatttaatatacagtctaaatggtagaaattcaactggacaatttgctatgatgacaacagtaaaataattgtctcatcttctcctttatggctttcactgacataatgtagtcaattcctccaacagtaaatttctttttctttttcttttttttttgagacagagttctactctgtcacccaggctagagtgcagtggcacgatctcagctcactgcaacctctgcctcccaggttcaagtgattttcgtgcctcagcctcccgagcagctgggatcataggcacgtgccaccacgccggctaacttttgtgtttttagtggagacgggatttggccatgttggccaggctggtctcgaactcctgacctcaagtgatccacccacctcggcctcacaaagtgctaggattacaggcgtgagccatcatgcccagcccaaatagtaaatttctatgtagataaagtaattaatcaaaaattggtatgaaacactctaccaactaaaaatctgtaggagaaccctcctcaaggcatttatattatataattgtggggataagactcagaaatgaaaaagtaatttcatttgtgaaatgcatttttaaaaaggcagtagaggataagaaccaaatgaatggtatataggaagtcagtgatatgaactcacagaagtattgaggagggaggctttgaattggtcctttcgtgatgagcaaaattcagaggataaagtaagtggaggaaaaacttcacattggggaaataatgaaagcaaaggcctgattgagagctggtgaagggctgaaaatcatacagaagagtgtggagttcgttggaatttatgaagttggtgctaagttgtcttgtttaccattatccccagcacctagcatatagcttggcatagctatgtgttggatgaatggatttttaaaaaatgaatgaataagccatagggagctactgcagattcttatttacaatgacttaaagaaaatggtgcttatgggagattaacctggcagcagtgatcatgatgagctggactgaatagagaagacagtgaagaaaggaccacctcctgggaggtcacatgaagtatggatatatggatctgctccagatggtgccttcaggtttaagaaacagttgaaggaacacataagagtcaccaatggagatgagtggtcaggcagaaggaggagtcaaagatgactggaagaatggcggtgtgtttatggggtctattgagttgtaagagaggagggtgtttcaggaggattgccataggagaaggtgacatttaggggcaggaagagggagggcatgaaggtgtggagtccttagtctaattgcagagaggagcatcagagtcgtctgctcttgtgggcaaaggcctcacgtgaaacattcaggctcctagtcctccgtcttcttgtaagctaagttaatttcctctgcaattctgtagcaatacaaactcattaaataaccaaatcaggaaagtgtgtctgtgaggtagttccatcatctttgatttctccttcgtttttctgtgatcctgcagaaggctattttttgttttgtatgttctaagtagggatgagggttctgctttgcttgcttctgaactggagaatgctgttggggaggtccccaaaggcagcaggaaaagccctggggtggaaagtgatgcttgctgtcgttattgtacccgctattgtacccaccctgtggggaaggctatgcagccaatgaatggtctagtcaaagcctgggcatgcctgtctctggaccccacatctgtggagggctttataaagagggtaaatttctgtctggaccagccaagtgaagacttgcccgaaggcaggtgtatatttagaggactgcctccagctgtttccctcccacagtggtgtctctgtggaagtgcatctgttacatgcggatcaaagtcatcttgccatgcagttcatagcatccatgcttttgtctttatcagaaaggtaataacggcttacagaattctgatagtggtggcagcatcacctggacagtcagaaataatgcacgtgagagatgaagggggcttatccctaggtgataacagtgacagtggaaaaagtggatgtagtagcaatggatgttgcaatgggactgtttcttttcttttcttttctcttttcttttcttttctttcttcttcttcttcttcttttttaagacagagtctcactctgtcacccaggctggagtgcagtagcatgatctcggctcactgcaacctccgcctcctgggttcaagtgattctcgtgcctcagcctcccgagtagctgggatttcaggcacatgccaccatgcccagctcatttttttgtattttagtagagacagggtttcaccatgttgaccaggctggtctcgaactcctgatctcaagcgatccacctgcctcggcctcccaaagtgctgggattacaggcatgagcaataggactgtttcttgaatggatgggattgggtggtggtgatcatgggggaagaagagtaggaaactagaggactcaagaatgacttctaggtatttgccctgaaaaaaaacagatggatcatggcgccatctattaagatgaaaaagacttaggtaggagccagtttgcggggaaaataaaaaattctgctttggagatgtgaagtttgagatgtctattactcatctaagtggagtttgcaagtaggcagtcagatatacatctcaggggagttcagggctgaagattcaaatttgggagatggatttttgtaaatctcccacctccttctcaggcattagtttaagataaggagagggtagaactgctccttgacttaccagaaatgaggagcagatgctatttgttcacttgtacttttgtccatccctcaaatatttatggagtactttcagtgctaggtactgtgctgacttttatggactggatgagcagatacaggtacagacaccgctctcattgagtttgacatccagggctgtgcagtagaaagtgagcctactacgtaagctgaattttctaatggccatgttgaaaaggtcaaaagaaagagatgaagttaattttaataatctattttatttaacccagtatatcaaaaattagtatcatttcaacatgtaatcaatataaaattactgagatattttatgttctttttctcatactgtcttcaaaatctgttgtgtctcttacacacagcacatctcaattcagacttagccgcatttcaagtgctcgatagcctggatctagaagatgctgtagaacttggctccctgatgtctaaacccctcccttctctcctgcccattggtgatctccagaccttcggggactgttgggagctccagtgtgctgtaaaatagtgaggtgtaaaccttgggcacacagccccagagcagaaccccagtccaccttgcccaaagtgccagcaatggcagcctgatgatagaggtgccatcatcacacagatcagtatccagctgttcctagccacacctggattaattagtgaccactggaagataattgctgtgttttaaaactgagagcattgccaccatgtaccatggtaaatatatttgttaacaagataaaaaaaatgttttttagtaaaagcaacttcaatcctggtgtctcccccgacaactccccttgtcctgttttcctggcactgggtgctgactactaggcagcacttcttctctgaatcccaccgcctgggcacaggagagatcagaatgtgtttggtgaatgaacgagctcaagaatgggaggcttactctgtgacttgcgggaggagaatgtgtgggatttttgacattggttccttcttcagatgacagatacagacaatgacgaatgctctctcttcttatcaggagagctcaacgtgggcgtttctttctgtaacaagtatgcatcatggctggctgactcctccccataacaagcagtttaaaggtgaacggaaatggatcttggcgatagcagcttttggaagcctaggcgcggcacagaaggtcagacaggaatggcttgtcttccactacaacatggggcttcatcggaagcaccgctgctgaggaacaaccacctcctcctgaccatcgcaagctgcccaggaagacatgctcatagcagtgtccgtttccctgcctaactttccaccagaagattccttcatgtctacgggcggacccaggccgatcttggaatgcatgtttaagtttgtctgacctttctatcttttgccttcctcttcactagagaacctgagcactaggttctcctgtattatttattttatcttattcttttctttttttttttttttttttgaggcagggccttgctctgtcactgaggctgaaatgcaatggtgtggtcatagctcactcctcggctcaagtgatcctccagcctcagcctctagagtagctggtattacaaatgtgcagcaccacagccagctaatttcttttctttctttctttctttcttttttttttttgtagagatgggagtcttgctgtattgcctacgttggtctccaactcctgggctcaagtgatcctcttgcctcagcctcccaaagtggtgggatcacaggtgtgagccaccacatctgggtagattcttctttaggttcctgagcctggagagatggcctgcaggggcatctgctgcaaaggaatgagataagctgtgataatctgggtcctccaagaagcagaagccatagattttatcagggagctggaaaaaagtgggatgaccattagactgcagtgcaagtctgactccaaatgaaggagaggaaaggttgtatggaggcctccttggctctagggaaagttcagcaaggcagaagagaagtgctgagacaacattctaggcagaggagccccatgtctctcaggaagggggctgcctagtgcccctgccatgccccatcacgggtggggagcagcccatggaaagggggggtctcagcacaggccaggatggattcagagcatggagtggcagctggtgccctgggccagatgcgctcccagctggaggcactttctcacaactgctgtgtaggcctgggtccacgttgtttcatgaggaaaagccatgcgggtgctgcctggcacatatgtagagcaagtgccatatgacacggtggaaggtgccctggaattggcatcaatgtcccaggtcaagtccctgatccgtcacttattattagttcatgatcttaggtgagtcactaaacctctcagagccttggtttcttgatcttaaaacaatacctgtcttacagtatggttgtagagtgaaactagctcttgtgagaaagagtgctttgtataatgttgacacaaatgcacacgtggtaacaaaagcaacaaagcacaactattaaagaccaatgacaggagctctggaattttgctataagcagtctgtggcaatgatagagatttgtctgtctctgtggttatacttgcacgaaactgcacaccatgccagtatacaaattccacagtgtctcagtcatttagcagatgtcagttgacttgactgttctgggcaggtatttatacaaataaaaaaataaaaagcatttcagaaaaccctattttttttttaaacaaaagatggcttttccacagctgctaaataattcaaagtcagcagtaattcatagtgagtcagcggtagcttcttactgcttcccactgctttttttccttttctgcttgtaagatgaagacactggcgatgaaagggctgagatgttttagttcccggaagtcccttggtctttttttttttttttcttttgagatggggtctctctctgtctcccagactggagtgcagtggtgcaatctcggctcaccacaacctccacccccggtgttcaagcaattctcctgcctcagcctcccaagtagctgggattacgggcacgtgtcaccacgcccggctaattttgtatttttagtagagacggggtttctccatgttggtcaggctggtctcgaactcctgacctcaagtgatccacccgcctcggcctcccaaagtgctgggattacaggcgtgagccaccgtgcctggccgcttgggttttgtgctagcgaaatattgagatctgtaggctgtggagcaacctgttagcgatgatgggtgagttcacaggcagaggcagtagctccaaggcctcaaccagagacccagatcccagggcagtgtcactcattttgtcaacgattctaggggatggggagacaggagctggaaaaataaaccagaaagacttcatgggtttatttctaaatagatgaaggttacagagcaaggtaaattttatgcaggaaaaacgggtggcagtagatgatctagtgttagaatctcagcatggccctggggctgggagcaaatgaaattagacgtgggattagtgggaaccaggtagccaagggtggaggcctaaccagaattgagtgattcacaccattaacaatgaccagctgtgaagaagcagatcaccccacctgaggacagccccgaaggaagaggtgcttttaccaccacccaaggatgaaagcagtgatttctccttcaaatccagccccaaagctgtggctctcctcaccagttttcctttccttctggccatgcaacctcttctgctccatggccagttcagaggacacatgactccagcaggaggggacaaaccagtcaccattcaggagcctgaataaccagggcttctgacaccgtgggcctcagactacccacatcagcaccacgtgggcagcttgttaaggaggcgactgcatgagcccacccagatctgcctgttcagaatgtctggaaggggactccagaacctgtgtgcccctcccgcatcttcctcaaggcattgttttgcacacaaacatgtaagaatcaccgggcgtggtggctcgcacctgtaatcccagcactttgggagtccgaggagagaggatcacgaggtcaggagtttgagaccagcctggccaacatgatgaaaccctgtctctactaaaaatataaaaatcagctgggcatggtggcccatgcccataatcctagctactcgggaggctgaggcagaaaaatggcttgaacctgggaggcagaggttgcagtgagctgagatcccgctactgcattccagcctgggcaacaagagcaaaactccgtctcaaaaaaaaaaaaaaaattgtgagacccaattaaatgatctctaagctgccagatcaaaaacactgtgacttcagaatcccagtttaagaaaaatgatcttatttctcagtaatttataattttaaaggtttaatcttctttctcccctaagtattatctctccgtctttaagtcccaacaaattatttataaaataatgtatgggctgggcgcggtagctcacacctgtaatcccagcactttgggaggccgagatgggtggatcacctgaggtcaggagttcgagaccagcctggccaacatgaagaaactccgtctctactaaaaatacaaaaattagctgggtgtggtggcatgtgcctgtagtcccagctactcgggaggctgaggcaggagaatcacttgaacccaggaggcggaggttgcagtgagcagagattgcgtcattgcactccagcctgggggacaagagtgagactttgactcaaaaatagtaatagtaataatgatgatgatgtgtgaagtttactatgtgcaaaaacctatgttttgcatggaggaaaaatatatgaggcaccctgcccttaaggtgcttctaggctagaagaggagctgaaaaggtgtggaaccaactttgccacaaggcagagagtgctcccagggctgataatccaggaaggggtcagttgataaatatcctaaatctcaatcctggcaataagtactgtataaaagatagaatcaaaggtctccaggatttcagaagagggagataggaaagccggcgggggcagtgagagaagctttagagaggaagcagcatttgagagaggactttaaggataagtcgtatttcagtaggcagaaaacattctggaagagatggcatgagaaagccatagtggtggggaattgcaaagtgtactgcagaacagggggaagctcattttggcgtgagtggagagggatttcactggaaagctgggatggtgtatcagttatcagttgctgcataatacaccagtccaaaatctaaaggcttaaaacaacaatagtcatttcttttgctcatggatctacagcttgtctgtgttccaccctgtcagcttaatgggacctggagagaccactttcaaagtggctccctcacatggctgggaagttggagggagctgtctgttccttttgtgggcttctctatggcttgaatttcctcacagcagtttgatttcaagagagccaagtgaaagctgtattgccacttatgacgtagctcttggagtcatagtatcacttctgctgcggtcacaagacgacatccaaattcaaagagagggagcaaagtgtcctctcagtggaggagtgtcagagtcaccataagaagagaatgtgggaagggaggtattattgtagccaattttggaaaatacatgtaaaactcttaacgcatgaaatacacaaaaactctaatcaggcattaaataataatataaatttaaaaaaaacacaaatttcattatatatcacaataacctttcaaataggcaaagcaaatattatttgtattttgcaaataaaggaacacaactgagaattggagtagaaaggtggatttgcaatgaatttaatgaagttttcacttttagagcccctcactagcactgacaccttcttccgaggccccagaggggacccagaattgtgttcacatggtcatatgtttcgtaaatgttcagaggtaaagtatctttactacaactagttaagtctgctgtaccttcacttcagcctcccttccatcacatccccttgcgtcaggtgttactgggcattttggagacccagctaaggggaaattgagttatagctatatttagttttggtggagtaggttataatgatgtggttttcagtaacttcaacacatggttaagttattactgggcaccccagtgtagaaatgacttccaggaatactcctatggcttactgactaactcaaacagcattgtgacactaaagtccaggaccagaggtcatactgtggtatgactgtatctcctagtacccagaattcgcatgaaaatatatgggtagtggagaaaaacaaggtttgaaaagtacatcgccagaagctagtctgtggagaattcttccaatcagatataaaattacaaggacaatacctttgtgtatagttctggcttttaaaatctttttaatgtttcacatattcaaagaacaaacttaaaatgaataaggtccggcaaggttacaggattaagagcaatgtacaaatattaattgtattgtatacagtagcaatgagcaaaccaaaaatgaaattaagaaagtaatttcacttaagataaaaattctaaaatacttagaagtaaatttaacaaagatgtacaaaacttatactgtgaaaactacaaagctttgttgaaataaatcaaagaagaaaccaaataaatgtaaaaacagtctatgttcatggattggaagatttaatattctcaagatgtcagtgttaacataacaagatgtgtgttatactttagtttttaaaaaatggccaaaaacgtggtgggatagttgaatatgattcatccttcccagacccacatgacctgaacactgtgatgcgttataatggcagggagaggaattttggattcaacctgatctgaattggaaccctggctttattatttactaatgtatgtctttcctcattttttcttgatgttgctggttctgattttcttcatttgctcaataaggatgataaatagctactcctcagggttgctgtggggatcagatatgatacgagtaaagggctggcactactggtttcctaaacccaactcccttccatcttgcccatgtcccatgcaggtattggaaaacccaagcattgactctccagaccagcctcgcacctaagaacgccgtgggatgcagtttcagacagtgagaaatctgctggggatgcctgggaaagggacatacctggcaggtgccgctccatggccttcttgctgccttgaattgggacatgagcctgagtcgcagcagccgtcttgtgactgagaggtggcaagcaggaggaagaggctaagagaatagagacactgttgagctgctgaagcacagcaagcggccacttctctatgcttcttgctatttgactgttaagctagtgcaagttacttttctggtcagaatgaattcataactgaaacatgctttaaagtatgactattattattaaatgcagcataagctttccatagctgctacacgatcacacccactgctgtctcagactgaccagtggccgactaaacatgacagcaagtactgttgccagcctctgccttcttatacttgtggagtttgtttaaatctaaattcaggactcaccctgttaaattt

SEQ ID NO: 60 - DNA, 74958 bp, Homo sapiens
gttgggggtgggaagggaaacagagaaaaggcaagtgaaacagaaggggaggtgcagtttcagaacccagccagcctctctcttgctgcctagcctcctgccggcctcatcttcgcccagccaaccccgcctggagccctatggccaactgcgagttcagcccggtgtccggggacaaaccctgctgccggctctctaggagagcccaactctgtcttggcgtcagtatcctggtcctgatcctcgtcgtggtgctcgcggtggtcgtcccgaggtggcgccagcagtggagcggtccgggcaccaccaagcgctttcccgagaccgtcctggcgcgatgcgtcaagtacactgaaattcatcctgagatgaggtgggttggcgactaaggcgcaccggtgggcactgcggggacagcagggccccgcgcgcagggaagccgcccggatcgcccggaaccgggcatcttccgtggcgggtcagccgagagcccgccgggtggtgctgagtagggagtcccgggctcggggctccgcgggccgctttcaggagcagctggccttggcaccgagcgtgcccgcgggaggcgggggggggcgctgctcggtggctctgctgcgtagccggtgaacacttggcaccgatgcccgccttctgggcaaggtgccctgagcccagcccctcgccgggctgcagcccaccctcggcgcgctcagcccgcttcaccgcttcagggacggaatagaactcgcagatgcagggtgtcgctgacattttcaactttttctgcggtttccgcccgctgtctctgacccgaaagtgcccccggacggttacagaggacacttaagtggtttgcaaagcctgtggtaggggaggagggtgtagaagggccaaaccacggaacttagttttattcatttatataaagcagcactccgattctttttgcgcggcctgaaatgcatgtgaccagagaagtaattaacaaaacaatgtcaacttctaaaaccgagacattacttagatgataaggcgcagcaactcggtgaatctgtacaaaccttggaaaaaaaacacattagtctatgggaccttccagttttctcatgctcctttccagctactaacctctcctaaagggaacaaccactttttggatttgattcccaggcctcgctttcaccgggaaattatcgttgcttgtaaaacagaagaagccgggaaggcaggcagggggagctgctactttacactctgtgctttgggatagcaaaatcccgcatttaagcaatccgaggaaacgagcaaatagacctccctcgcctctccgagcacactcaacagttccggttgcaaaatgtttgcctcctgggcttcccagcgtcccgttagttgttctatttacacataattagatacttaatggagagagaaactagaagttgaggcgttcctccaggctgtattgtaaagtatgaagtgaaatccaaaatgaaatggtaatgttagaaagcaacctcattaaaaaaaaaaaaagtaacactggtcttgaagatctttcaatgtgagtacataaagatctatctcatttcttttgacagcccatagtatttcataaactagatgtaaccatttcctattgacaggaaattagcttgtttccaatttttcaatcccattcattcatccaacaagtatctgttgagcacccactatgttccagacagtgatctagctactgatgacacaagagtgaatgacgaagttctcactcatgaaattttcaccttagttgggagaaacatgatgcaatgaaaatcttcatacatacattgtgtgtacatatgggagtatttctgtaggatagatttctagtgatgaaactgctgagtaaaagggagaattatgcatattttaagttttgatttttccaaattccaggtattccatatatactccaaaatagttgtgccattttactctcccatcatcagtctatcagaggggatgctttcccacaatctcttgaatgctgaatattttcaacttttttacttaagagaaaaaagagcatctaattgttccctcagtatcagtgagtctaagcatcttgtatatgtttatttgccatttatatttttttctgtgattttcctgtccagatacttgatactttctattgagctgcttatttatttcttatgggagatttttatatattttagataatattctctctctcacacacacacacacacacacacacacacacacacacacacacacacacatacagtcttacagccacatccctgaaatcttgaccttgtgaacatgttttactggcagcactctggactcgatcattgccttgagactatttcttttttgatattctttggaaagactaacaatgacagttttattttcaaacccaacaaatcctggcatggaaatgtttgctcttgattctgcttttaaaaaaataaagaattattttctctctttctttctgcaccttatcagaaacagctaaaagaagtgagttgggccaggcactgtggctcacacctgtaatcccagcactttgggaggcccaggcaggtggatcacttaaggtcaggagtacaagacctgcctggccaacatgctgaaactccgtctctactaaaaatacaaaattagccgggtgttgtggcgcgtgcctgtaatcccagctactctggagactgaggtgggagaatcgcttgaacccaggaggaggaggtagcactgaaccaagatccagcctggccaagagagtaagactccgtctcaaaaccaaaccaaaccaaaccaaaaaaagaagtgagttggcactttcaacattctgcctggaaatctccttaccaaacctataagatcattaggtatattttctgcactttgtattgtgacaggtgacagtgttaccaaactttttaccaggacataatagggtctgcctttcttctagttgctaacaatttcccccaagtccatcttgcctgcactaacagtctcctttagacctctcctctcctgcctgtcacacattcctagtactaatgctacagtatagtagtaagggtctccagagaaacaacatttatataacataatataaatacattaatagagagaaagagattttaagaaattggcttatatcattgtgaagtcgggcaagccccaaatctgctggacaggccagcagcctggagacccagggaagagttgatgttgcagctggagtccaaaggcagtctctggcagaattctcttttacttctgggaccttggtctttctcttaaggccttcaactgattggatgaggcccaccacattatgaagggtaacatgctttacaccgagtctcctgacttaaaatctaaaaaataccttcacatcacaactagatgtgtttgaccaaatatctggataccatgcctgggcgaattgccacttaaaattaatcatcacgtacatgttttaaggttttgttacacaagacctcacttccaagtatcactttctgttttggtcatcagttgctgcataataaacaaccaccctaaaatttagtgacttaaaacaacaatcatttattgtctgccatggttctgtggtttgactgggatcagctgagtggcctgtttcacttggtgtcagctgggggtgtaggcatctgcaacattgtcttggcaggaacatccaagatgtcccacttaacacgatggctcctgggctcagctgggctggtcaggcctcccttcctctctgtgttgccacacggcctctctctatccatgtggcctctccatatggtctctccctggtggaggtgaatttcttcaaggtttctaaactctcaaaagtggagcctggcaagcccactcaaagcttcagatccacaactggcacagcttcccttccacagattctataggttaaaacaatcaccggaccagcccagattcaaaagaaggagaaacaaactccacccctccatggaggaagtagcaaaaataatgtagacagtttttaccctttacatctggatttgttagcttttctgttttcattttcttctggtctttcttttgtccttctcttacacttattttattaccttttatcaattagcttttaagatgataaaaatctaatacatgcctcctggaatgtcttcttgagcctagggacttttgtttaatgatatatcttgaggacctagaatagtgcctgaaatacaatagtcattaaatatttagctgaattaaatgaatggtatataagccagggtattaaaaataacataaacaaagttgtaataaatatacttccccagtgaacgacctaataccattactccccaaaccctcaatttctgtcttgagcatagaaactgttaatttttcctttgtgtagtaggtccttagtatttctttagaggttgtagcactttatcttcctcactgttccttttccttggttgtccttttccaaacatctctcaacaatttctcccaagtccatcttgcctgcactaacagtctcctttagaactcccctctcctgcctgtcacacagtcttagtaatagtgccacagtatagtagtaagggtctccagagaaactcactttctgcaagttttttagtgtgggtaggtgagtattgaagcttgttcttggcgttaccaggttggttctttgagttgaaccaggggcattacatgcggaatattcctgaacagatcacctctggttctgctgtctcaagggccacacacaagagctgccttctgaccaagatgtctctgggcacatgagacctgaaatacacatggccaagactcaacaaagcgtttgctgactgtcagagctgacagcatctcggtactgtgggagggagcccagtgtctggtgatagtcaggacggacccaggtgatgtcaggggtggggtggggcctgcaggagggaatggagagccagcacctaggggaagctgggaatttaggaagatatccagagagtgtaacttcagttccactaatctcacctgggtgaaaaccagccctctccatggatgatggtgattgcaggtactgacgatagctgcagactgctggtggtctaggcaagcatgcagggatgggagcaggcatttctgagagctccccttatccctgccccaagacaaggtgggggccctgtggggaaggactattttattcacttctgcatctccagttgtctaacacattgcttatcacctaacagtctcttaatagaagcttgctatattgagctgccttgagtccacatcatgctggttgaacataagtagaaattgtgggagacttaatcagagaaaatctttcatctgtcttaccttacgttctaatgatcacttctgtgcccacaaggaccatcttttctgattcatgttcatgtcgatttcttttttatttaacttcctcttcaaaatttctggcaggatttcttgggagccaattctccatttttacttccccatgcctcccattttaatgactgtaggattttctcagggtctactcagcaaaacttgttagtacaacatgagcaaaacagcaaatttatgcaaacacttagcaaagacttagctgtctgcctaatgctagggtgagacatgggagattcacaaatgaagaaacacaagcattgatctccaggatcctgcagtgggaggtatgcggaggaccaacctgggaacagagcaacgcaacaccatgtgatctgtaatgaaaaagaggcctgtacacagccaagaggtcactgaggaaggagccattgcttctgtgcagttagtgctgcgctagattctgcagggatgtaagaaatgtacccctatcaaacaagaaagactatgtgaattgctgaatatgtgagtggagtaccagcacaatgccatggagatgcagacgtgccccatgtggtggggcagagtcaggaagcactttaagaaagaaatagcatttcaggtcttcctttaaaggtagaatttcaacaagagggtgctctggagagtgtgtgttaccctgctgagaaaatcctggcggtcaggtaagatgctactgccagggaagattggccaattgattgactaaacccttaaaggtttggggatcttggggaggattctgctggtgagagggtctggacttcctcttggtctgtccacagctggaccttctcagcacacaagagactatgagggtgaccattttgcacaggacagaattccagcatgtttttcccctggagtgatggaatgaccacctgctcaacatcagtgtcctcactgagaccatgagattcagtagagtgctggaaagcttcatgcttacctgtgtcttcttaatgcttagtgttatgattgaaggcttccttcagtcctaccttttgttctggggttctaagaatcttaggtgcaggcgaggcacggtggctcacacctgtaatcccagcattttgggaggctgacgtgggtggatgacgaggtcaggggattgagaccatcctggcaaacatggtgaaaccccgtctctactaaaaatacaaaaattagccgggtgtggttgcgtgcacctgtagtcccagctactcaggaggctgaggcaggagaatcgcttgaacctgggaggcggaggttgcaatgagctgagctcacgccactacactccagcctgggtgacagagcaagactctgtcttaaaaaaaaaaaatctcaggtgcacctgagacagattgaatgtggaaggggaagtgaaacaggccttccaggtgtggggcctgggtgctgctatagttacaaatggggaagtgagactataggtctcagttacctgtggaaggaagggtagagtggagtacttacgcaaattagctaattctgggagcttggggtgctaccagggtatcagggagaatacagccagggaatagaatcttcttgaagcaaaggctgtttggaagcccccagagtggatgaaaaggctcagtgggaaacaacagatatcaggagagggagaagaagatacctatttctataccttttggccttgtgttttgcttcagacactgttcccagcaaggtcagtggaacccactgctcaaaacacacacttgctccttgttctggtgtcataatagctctgcaagcagtggtggtgttcagcctggagaacgttccttttctttttttttttatcacaataaacactcatggcttctctgcttcttcctttcttctttgtcttaggactcttgaaaaacagctgccaaatgtcagtttagatattttggagggaaaaaagttgggaatcaatgtttacaggttgcctgcaatgtgctggaaactacatagttggttctttttaaactttctctgaatcctgtcaggaaagttccagcaatcacatcttagtgggtccggaattcgtgggttcttggtctcactaacttcaagaatgaagctgtggaccctcgtggtgagtgttacagttcttaaaggtggtgtgtccagagtttgttccttctggtgttggacatgttcggagtttcttccttctggtgggctcgtggtctcgctggcttcaggagtgaagctgcagaccttcacggtgagtgttacagctcttaaggcagcgcgtctggagttgttcgttcctcccatctggagttgttcgttcctcctggtgggttcatggtctcactgtgctcaggagttaagctgcagactttcgtggtgagtgttacagctcataaaagcactgtggacccaaagagtgagcagcagcaagatttattgcaaagagcaaaagaacaaagcttccccagtgtagaagtgtagaacgggacgccaatgggttgccagtgttggctccccccagcctgcttttattcccttatctggccccacccacatcctgctgattggttcattttacagagggctgattggtctgttttacagagagctgattggtccgttttgacagggtgctgattggtgcatttacaaaccttgagctagacacaaagtgctgattggtgtgtttacaaaccttgagctagacatagagtgctgattggtgtatttacaatcccttagctagacataaagattctctaagtccctagtagattagctagacacagagcactgattggtgcatttacaaaccttgagctagacacagggtgctgattggtccgtttacaaaccttgagccagacacagagtgctgattggtgtatttacaatcccttagctagacataaatgttctccaagtccccactagactcagaagcccagctggcttcacctagccgattgtgcaccaagtcagcaggcggagctgcctgccagtcacctgctatgcacccgcactcctcagcccttggacggtggatgggacgccagggagcagggcgcggtgctcgtcggggaggctccagcggcacaggagcccacggcagggagggtggggggaggctcaggcatggtgggctacaggtcccaagccctgccccgcggggaggcagctgaggcccagcaagaattggagcgcagcgccagtgggccagcactgctgggggacttggcacaccctccacagctgctggcctgggtgctaagcccttcactgtccggggcctgctgcgctcgccggccgctcagagtgcggcctggggagcccacgcccacctggaactcgcgctggcccacgagcgcctctctctctacacctccgctcaagcagagggagccgactccggcctgggccagcccagagagggtctcccacagtgcagctgtgggctgaagggctcctcaagcacggccagagtgggcgcgcagaggccggggggcactgagagcgagcgagggccaccagcacgttgtctcctctcattagggttggggaaatggaccctgagagagattaagtaatttggtgatattctatagtcactctggctatgtaatttatggagcctagtacagaatgaaaatgtggggctcatttttcaaaaagcaggaaacagcttttcctttcttccagggtctcttcctccacctgccatgctggtgtttggttgctatttaatgttgagccctcttgggcacagggatacttgcagggacagggtgtctgctcatttttctgtagacctcaaaggtgagtcctgaggcttcagggtcactggcctccttttagggagtcacgacgccttgtctttgtacttcaggaatgattacgaatctttgtaggtaaagcggcagaatgccacgtcctctcctggttgccaggacgtgttccttgtggtttaattgccgggtctgccctgcagaccctggctgagcgacagatgaaaggagtactcagacacaggtacgcagtgaaagagcggctaggggactgccgaagagtcagcagtctcaataaactggagctgctcacttttattcagtacagacataatgccgaaagcctggagccaacgcagtctgtgggtaattaacattgttgttccgccgtgcagggagcagtctcgccagaggatgatgaaaggttggtttccggaagtaaacaagcttatttagacaaactcccctacattcccttgtacccactcctcgccctctgcgtcagggtaagagaacagctgccttcagcttattctcccccgaagctttgcagagccttctgacctttcaaaaggtcttcttctttccctatcggttctcccactactctgactgatctcctatatttgatctcaccttaacaatcacttcttagagctgggtcaggaagtatgcagcatgcacctggcactcctagtactgtgcccatgatgggcattgctgattgttcagagcatattggatgagcctggttcagcctcagaatcttccacccagtgcaccatggagatgctaccaattggttggagttgctctgagaggtgacatttccttgtgattctgcattagaaacatgttgtttgtcagccgaaacagggaaacctgacacgttatccgcccccaggaagatcccatcatcattccatgcaccttcagtcctgggagcttactttaaaaaaaagtgactgacatatgagcgcaggtccccaaacagaggggaggcaggatgagaagccagatgaagagagtcaaggtcctggggctgcttagcttggatgaatctgatgggaggtggggtgcatctgagtgttctctgctgatgaagaacagacttgttgcacgggggtaggtgtgtgctgtgtaaacacacatcagaatcaggaccccgaatagtgaataggcaagagtaacagctgaatttgcccagctcatcacaatttaacatcagttttcaaaaaggtaagagcgtggctttcatagcatgcagaatcaacacacatcaaagattgatttactcatttatgaaggaatcagcaaaatgacaaacttagttcagagaatattttgaggctctgagtagatataaaactggttaatgtttctcagggcaataaaaagctataaacgttggggatttcttttttatcagacagaaattatttgcatacttaacagaaaagatctccaagttaccatctaacttcataaggttcgaataaaacttcatagagttattaatgaatggtaaatagaaaagacaaatatatgttttaccagataattaagtaattcttggtaaacctggcaaacagtaccccagtgtgactctgaaaagacatgctgcccatctttttgccttatttccacgttttaggtatttttgtaagatatctattcaataaatatgtattgagctcctatgatgtcccagaaactcttttagatcctggagatatagcagtaaacaaaacagatgaaattcttgctcacatggaacttatattctagtaggggagacagacattgaaacagaaaaatacatagtatggcagatggtggaaagtattaaaaagagtgctgtgtagtgtttacaacttactcatttatgaaggaatcagcaagatgataaactcagttcaaagaacatcttgaggcaccgagtacatttaaaagtggttagtttctcagggcgataaaaagccataaactttggggatttcttttttaggtatggaaacctaaagtaaagaagatgctatggtttgcacatttgtcccctccaaaactcatgtttgaaatgtaatcccagaagtggcaggatgagagattggccctttaggaggtgactgggtcatgagagatctgccctcatgaatggattaatccattcatggattactgattaatacgctaatgggttaatggatcaatgggttatccttggaatgaaatggcaggctttacaaggagaggaaaagggacttgagctagcatgctcaccctcctcaccgtgtgatgccctgtcctgcctcaggactctgcggagttctggtaagcaagaaggctgtcaccagatgtgtcccctaaaccttggactttttggcctccataactttaaggaataaattcatttttaaaataaattacccagcttcaggtattctgctataagcaacagaaaatgactaaaacaggaggctttactggaaggtgtcctcttagcaaagacctaaagaaagagggagagtgaaacatagaaatatctggggagaacatcctaggtaaaaggaacagcatgtgcaaaggccttgaaaagcagcaagccgctctccctctccctctccctctccctctccctctccctctccctctccctctccccctctccctccccctccccctccctctccctctctctccacggtctccttccacggtctccctctgatgccgagccaaagctggacggtactgctgccatctcggctcactgcaacctccctgcctgattctcctgcctcagcctgccgagtgcctgcgcacgccgccacgcctgactggttttcgttttttttttttggtggagacggggttttgctgtgttggccgggctggtctccagctcctgaccgcgagtgatccgccggcctcggcctcccgaggtgccgggattgcggacggagtctcgttcactcggtgctcggtggtgcccaggctggagtgcagtggcgtgatctcggctcgctacaacctccacctcccagccgcctgccttggccccccaaagtgccgagattgcagcctctgcccggccgccaccccgtctgggaagtgaggagcgtctctgcctggccccccatcgtctgggatatgaggagcctctctgcctggctgcccagtctggagggtgaggagcgtctctgcccggccgccatcccatctaggaggcgaggagcgcctcttccccgccgccatcccatctaggaagtgaggagcgtctctgcccggccgcccatcgtctgagatgtggggagcacctctgccccgccgccctgtctgggatgtgaggagcgcctctgctgggccgcaaccctgtctgggaggtgaggagtgtctctgcccggccgccccgtctgagaggtgaggagaccctctgcctggcaaccgccccgtctgagaagtgaggagcccctccgtccggcggccaccccgtctgggaagtgaggagcgtctccgcccggcagccaccccgtccgggagggaggtgggggggggtcagccccccgcccggccagctgccccgtccgggaggtgaggggctcctctgcccggccgcccctactgggaagtgaggagcccctctgcccggccagccgccccgtccgggagggaggtgggggggtcagccccccgcccggccagccgcccagtccgggaggtgaggggcgcctctgcccggccgcccgtactgggaagtgaggagcccctctgcccggccagccaccccgtccgggaggggggagggggggtcagccccctgcccggccagccgccccgtccgggagggaggtggtgggggtcagccccccgcccggccggccgccccgtccgggaggtgaggggcgcctctgcccgtccgcccgtactgggaagtgaggacccctctgcccggccagccgccccgtccgggagggaggtgggggggggtcagccccccgcccggccagccgcccagtccgggagggaggtggggggatcagccccccgcccggccagccgccccgtccgggagggaggtgggggggtcagccccccgcccggccagccgccccgtccgggagggaggtgggggggtcagccccctgcccggccagccgccccgtccgggagggaggtggggggatcagccccccgcctggccagccgccccgtccgggaggtgaggggcgcctctgcccggccgcccctactgggaagtgaggatccctctgcccggccagccgccccgtccgggagggaggtgggagggtcagccccccgcccggccagccgccctatccaggaggtgaggggcgcctctgcccggccgcccctactgggaagtgaggagcccctctgcccggccaggaccccgtctgggaggtgtgcccagcggctcattggggatgggccatgatgacaatggcggttttgtggaatagaaaggcgggaagggtggggaaaaaattgagaaatcggatggttgccgggtctgtgtggatagaagtagacatgggagacttttcattttgttctgtactaagaaaaattcttctgccttgggatcctgttgatctgtgaccttatccccaaccctgtgctctctgaaacatgtgctgtgtccactcagggttaaatggattaagggcggtgcaagatgtgctttgttaaacagatgcttgaaggcagcatgctcgttaagagtcatcaccactccctaatctcaagtacccagggacacaaacactgcggaaggccgcagggtcctctgcctaggaaaaccagagacctttgttcacttgtttatctgctgaccttccctccactattgtcctatgaccctgccaaatccccctctgcgagaaacacccaagaatgatcaataaaaataaaataaaataaaaaaaaggaatgaatcaagaaaaaaaaagaaaagaaaagaaaagcagcaagccagccagtgtgtttggaatgttctcttatggaaaatttcaaagatatgtaaaactagggctaataatacaattaacccctacttacccattacccaacttcaacaactatcaacattctgctgttcttatttcatctatttacccattaaaaaaaaagtgtactttaaagcgaattccagagtttgtataattttgtctgtaaatctttcagtctgtatctctaaatctttcagtctgtaactctaaaaagaacattaaaaaacacaactatcataccatcatcctacctgacacaactgagtaatttttcatatcatccaatatcgatcagaagtttaattttccatgattttctttaaaatgtagttttataattgatttgttctaatcaagatttgcacattgcattaaaaatatatgtatcttaaatttcctttaatttacaaccatttccctcccccatttaagagtgcatattaatttattaaacagactgggcaattcatcttgtagaatttcccaccttctgggtttggccaattacatccttgtggtgttatttaaaatcctcctctattccctttattatctgttgactgacagcttggccaatcagaatcacttgaacgagctgattacaccccctctttctgaaacgttttcttcccttgagtctgtacacactgttggcttccaaatttatatctccaacccagacctctctccagtacttctgcttgctactgtgtttttcataactttctgatttttttagtatccaatgctagaaaatatatccattttgagaaagagacaaagtatgagctcatattgataatttcatttcaaagtaaagggaacaaagtttttatttaacatgttaattttatgcttgtttctcttttacactgaaaatcttagttctcaatgacattaatataattatgtatttacttcccatatatatgttgtatataattgttttatatatacatatgtgcatatatattattgctaatgaaacgtctactgaatgatgtaagttttctctgtgattcttttggtccttgggacacaggacttatcccactagtgatgtgtagtcaaaatactatgtaccagtgtttgataccttaattaaaggatctctctggctgctgcattgagaacagatggtagcaggacaaggacatcagcctggaagccatctggaagctctttagtgattcagataagatttgattttggcttggatggtgatggatgatgttgagaagtgggtggattctggatatgttttgaaagtaggttccatgtgatttgccatgggctaatatatggaatgtgagagaaaaagaagaaacaacaatgcttccaagattttggggcagaggtactgaaaaaatgaatttccatttatcagaaagagaaagactgtggtaaagcaagttgggaaggaaacagcagctcagttttccacattcagtaaccctcccttatctagggtttcactttctgcagtttcacttatccatggccagccacagtctgaaaatattaaatggaatattccagaattaaacaactcgtaagttttaaattgagcactcttctgagtagcgtgatgaaatctcatgatgtcctgctgtcttctgccctggatgtgaatcatccctttgtccagcatatccatgctgcatgttgtacctgcctgttacttgcctaagcaagtggatggctacttgcttagtgtccatctcagttatcagattgaaaaagcagtacatatacatagggtttagtactatctgcagtttcaggcatcactgagggggttggaacataaccctggcagataagggagactactgttttagtggagatgttgaccagaagactggttcatatgaatatgggggtcctggagagaggtctgggctggagatataaatttggaaatcaacagcgtatacagacacaaggaaagaaaacatttcagaaagagggggtataatcagcttgttcaagtgattctgattggccaagtaagatgaagattggaaattgaccaatggatcggtgacttggcaaggtcagtttgggaggagtggtagtgatgaaagcttatgtggaacaaattcaagaaaaaaacagaagagagaggaattagagattgttgtgcacagacaactcttgcaagaggttttgctggccaggagaacagaaatacaagtgaagtagtggctggatgttttccaaaacatgaaacttagttttcataggaaaaaaatggtttttctttttctacttattcaattttgtgcacaatttcattacattatataagtaaaaaccacaagcacgaacatgtttataaataggtaaataaataacaaagtagatagaaacaaaaattctcaggtgtgcaaaagagtagtttattagctgtgtagaagacagaaaacttgcttttatagagggaatgaatagtgttgattagtatagtgagtcagttaaataggtatcagttgaattttttgagacaataagtacatttagaattggctaggcattattcttccattaaaggaaactcttagtaatagattaggtcagaaaaccacaaagacagttttcttgaataagggggtggtgggaaaaaatggatgtaagatgctgagaaaaaacaggaaactcaacaatagatgaaatcaagaattagtttcgtgtgtgtgtgtgtgtgtatttcacagaaaagggctgaaaggggaggaatggttatattcacagatttttgtagttgatcttaatagggaataggagattacctttttttcagcaaaatattaccagcaaatgtctactctggaaatagaggataagaatcttctatttaaagaccaaaaaggtgaaaactgaggtcagaaatttaaagagtaaatgtagcaagatgctaacattcttgttccctctaataactcttcttttttaaaaattataaaagtaaaacatgcccattgaagaatatttggatgaatacaaaaatatagaaaagaatgtaaaatcgcttaagcccccaagtagaattctaaatagcggagaaacccacgatttaaaaaaataaataaggagatccacaaaaggaagatatatacctgcttaagtggacggcctcagcataagtagtcttacagttacaattaattttttttctattatacgatgttttaaaaaattgctaagctcagttgtctactccctgctagaatgtatcaaacatgctgcatccacatagtagacagttattctacatttttggtctttggatgttttgaagcaattagcaaagtttgatttgaagagacattataaatttccgacggcatatttttctctggccatgatccatatttgccttgatattgtccaaatgttcattttatcttatgactatcaagcaaatattataaagttatttgtgaatttggcacttcatagatgaaatattgtgaaattctgaataaaactgcttcattgattatcttggttcctaaaagagatagtttatgagttaaattatctctaacgttgtctaagttggcagtaattaaatctccatgggaattcttaataaaggcaaagaaggactgaaaacaccttgctgaaactgagagagatttaaaaccacaaaaaaaatgtaagatttagttagttgttcacgttttggggtcctgcttttatgtgttaatacttccagataaaattttttcaaaggtagttttgaaccccaggatctgaatatattaatttgtttatctctgaaaactgtatactttgtgtttcccaggtctggctttcttcatttttcctacttgagggaactccttttcttccttcaatatcctcatatcctccttcaatgtttctcagtcaatatctcctctcaatttttccatttaaaaattaaaaattaaattattaacattttaaatacactgaaatgttcatggaatagtagtacaaatacccatttacccaccacatggagttaatagacaataaaaatttgccatatttgttttacatcttttttctagtttttaaagaaataacatgttacaaataaaatcgaaatactctttccgccgattttcttttctcctgtctcagaggcaaatactgctacttgcttctcttgtatctttttagaaatattctctgcatatataagcatatatccatatatttttccacacatagtatctcttccgtgtcttagtttttttcattctacaatgtatcttgatgatcagtgtagctttgtttcattctaataattatatagattccactttacaaatttactatactttggacttgtatctatgaacgtttcgattgttttaaacctttggcaacattacagacaatgctgcaatgaaatccttctgtatgtatacatacgtggatgtgtgtataagatataattctggaagtagaattgctaagttaaagcatatgctacttaattttgaaaaaattgtcgaacttctcttcacaaggcaattatcttcttgaggtaatgagaactcctatttccccatacccatactacccagagtatcttcaaattttctgatttttgctggtctgataagggaacgttacctcagtttaatctttatttgcatttactatgtgtttttgccctgtagagtgaattttacttttctacctaacaatatatttttgtgattttaatgacattacttttgagatttacccatgctaatatataaactctggttctgcaattttaagtgctatatagtatcctattgaatgaccatactactcatttatttattattatctacttgttaattagtctgttatcttttttgtcagtttttgtgggcataaacaatgctaaagcatacatgtctacttgcgcatatgattttttcccagtgtgtttaatagaatgactaaggtagaatgactaaagttctgaggtgtggcaggtatgccatcttcacctttactgggtatgctagtgtgctgcagctgccgtgataaagtactacaagccgggtggcttcaacaatagcattgtactgtctcacagttctggaggctggaagtctaaaatcaaggtgtcagaagggtcggtgccttctgaaggtgtgagagagaatctgcttcgtgccctcttccaagcttctagtaacctcaggtgttccttgtcttgttgatggtgttgtcccagtgtcttcatattgtcttctctctgtttgtgtttgtgtttgtctctatgcccaaatttccccttttcataaggacccagtcgtatgggattagggcttaccctaatgatctcatcttaacttgatcatctgtaaaaccttatttccaaataaggtcattttctgaggtactgggtgttaggatttcaacatcgtttgggggggtaaaattcaatcaataacaacaggtataccagttaagatgtttttggctgcaactaacagaacattcaactgaaaaggtttaaaatatattgtaaattttaaacaaatgttttatagagatgagttctgactgtgttgcccaggctggtctcaaaatcctggcctcaagcaatccttccaccttggcctcccaaagtgctgggattacaggcatgagccacagagcctggccactttaaaatgttgttgacacacataacaagacatccagaagtggggtggtcataggatcggttcagcagcacagtgatggccgaggctctttccttccactcttccatctcccttgagtggctttcagcttcttgtcacaagattgctgcattatgtcctcatatacctggaacagagggcagggagaggggcaagagcacacccccatttcaagtctcttttcatcccaaagtaacatatttcccagcagccctctttcaaccctctctaggcttctccttaaatttcactggccagaattgggccacacggttacccaaaggtataaaagaggcttgagaagtgagaatttgatattttgaatcataataggagacatgctttgccaataggaaagaagggtaaaagaaatcttctggagagtacggaaccaacggcgtctgccacgttgcatatggccaaatggtcaccaaatttgttgtatcactttattttcacaaaattggtgtaaagtcctcattgctattcatcctcgtcatcattcggaattctcaaatttaaaaaatgcccatttccttgttgttttatttttttaattccctgatcattaacataagtaattatctttttatgtgtttatttgtcattcaggtttcttctgtgaaaagcctatttctgtcttttgcttgttcttatgttgaattgtctctacacattcaggattctaatcttctgtcagttatgtggattgcaaataaagtctcccagtctatggcttaactcttgacactatatttatcacgtcccttatttactaaagatttaaatatgatcaaatttatgttttcttttagggttgtgccttttgtatcttatttaagaactgatttctttaatgtgagatcacaaaagggttataaatattctaaaaatgttaaacttttgcttttcatagttagatctttgatccacttggaatttatctttgtgtgtggtgaaattaggaagcccatttcatttttccccagatggatagtcagttgtgtaagtgctgtttatcaaataatccatcctttatcgagggttttctgatgccacttctgttgcatcttgtgtttctttatgtatgtcagtttatttctggactctccaatctgttttatggtctgtttgtcgctataccactgccacgttgtttaaattactaatgctttgatatccaatagaacatgtctgctttctgttacgggagataaatttacatttttaagaagtttatataaatggaatacatatcatttactcttttgtgtctgagttgtatgtctttgtcatgatgtttttgtgattcatccatgttgtatgtattaatagcttgttcctttttattattgggtctattgtgtgtatatatcacaatttgtttatttatctattgatagacatttggcttgtagtcactttttggatacaatgaatagaggttctatgaacattagtgtacaagttattgtatggacatactgacagagcaggagcacagtcctcttggacaaacactgccactttaagttccagctccatttttagcctcatgcatctcagggaaatcacttctcttctaactacaagtagccagaaagagcaaacagtaaaccacagataaaacagctcaggcacagagggaggagggagaaaagtctcttgggtaactgccacacttcaccctcatacagtgggccccagtaaaacagtgggcgttaataaacacattattttcccttcaggtgcactaaaatagggaagctaaaagcagactcggggggtatgcctgcagctgcagaaaaatgtataaaaacagacacacaactctccctccaaaataagcacaacaaaaaacacaaaagcagtccaagcctctaataaactctcctatcctaaatccttaaaaactcttagtctgtaagagagtgtgctgttgacctagctcagccaaaagctcctcacaggttcgttttctctaaaataaacctgtcttaactggcaagccacctttcgtgttttttttcctctttctttaattcttacacatactgttttatttctcttgagtgaacacccagaaatagaatagcagagccatatggtacataagttgattagctttttgagaaaccaccaaactgttttataaggcaattgtatagttttacatgtgtagcatcagtgtgtgaatattctagttgttctacgtccttgttaacatttggtattgtcagacttttaaattttagccatctaaaaatttatagtgttattttatggtggttatagtttgcatttcccccatgactaatgatgctgaggatcatctcataggctttttgaagtatgtgttcaaatcttttgcccatctttaaaaattagggtttttgttttgtacaaatacttggaaattaagcaacatactccagaatgaccaatgggtcaatgaagaaattaagaaaaataaaaaaacttactgaaaatgatgaaaacatgtctaacaaataaaaattgatacacaacataccaaaatctatggaatacagtaaaagcagtactaggaggaaagttcatagtaatgattgcctacgtcaaaaaagtagaaagatttaaaacaacttaacagtgaacctcaggaaactataaaagcaaaacaacaacaacaaaacccccaaactccaaattagtagaaggaagtaaataataaagatcagaacagaaataaatgaaataggttggaaaagtaatacaaaagatcaacaaaatgaaaagttgttttttaaaaaaaattgactaagcattacctagactaactaagaaaaaagagggaagaaccaaataaatgaaaaaggagatgttacaattgataccacaaaaatataaaggatcgtaagagactattatgaacaccaataaattggaaagcccagaggagatggataaatttctgggcacctacaacctaccaagattgaaccaggatgagatacaaaatccgaatagaccaataacaattattgaggaacctcaataataatttttattaaacaacaataaaaagtttcccaattaaaaaaaaaagctcaggactggatggctttactgctggattctaccaaactttgaaaaataactaccaattcttctcaaactattccaaaaaattgaagggaagagaattcttccaaactcattctataaggccagaattaacctgatacaaaaccagacaaggatacaacaacaaaaaaagaattttgcaggccagtatccctgatgaacataaatggaaagttcctcaacaaaatactagcaaactgaatccaacagcacattaataagtttatttactaaaaccaggtgggattcattccagggatgcaagagtggttcaacatatgcaaatcaacaaacataatacatcccatcaacggaatgaaggacaaaaatcatatgatcaccacaatagatgcagaaaaacagttgataaaattcaacatccctccatgataaaaactctcaaacaattaggtttagaagaaggaacacacttcatcttaataaaggccatatatgacaaatccacagctaatattgtaccaaacagggaaatgttggaagttttttctctaaaaactggaacaagataaggatgcttaccctcactactctgattccacatagtactggaagttctagccagagcaattaggcaacagaaagaaataaaagacatccaaatttggaaggaataagtcaaattgaccatgtttgcagatgacatcctcttacctacagaaaaatctaaagactccaccaaaaaactcttagaattgatatacaaattcagtaaagttgtgagatacaaaatcaacatacaaaaatcagtagcatttctatacaccaataataaactatctgtaaaaggaaccccacttacaatagctaccccccaaaaaaaacctccacctaggagtaaatttaaccaaagaggtgaaagatctctagaataaagactacagaacactaataaaagaaattgaagaggacataaaaaattggatagatatcccatgttcatggattggaaaaattaatattgttaagattccatactacccaaaggaatctacagattcagtgcaatctctatcgaattttcaatggcatttttcacagaaatggaaaaaaagattcttaaatttgttaggaaccataaaagaccccaaatagccaaagcaattgtttgttttattttattttattttattttattttattttattttattttattttattttattttatttcacttcatttcattttatttttgagacagtctccctctgtcacacaggttggagtgcagttgcatgatctcagctcactgcaatctctccctcctgggttcaagcaattctcctgcttcagccacctcagtagctagaattacagacatgcactaccatgccctatttttagtagagatagggtttcaccatgttggccaggctggtctcaaactcctgacctcaagtgatccacctgcctcagcctcccaaagtgctggtattacaggcatgagcctctgctcctagccaagccaaagcaattctgagcaaaaagaactggagggatcacactactttactttaaaatataatactatagtaaaacagcattgtattggcattaaagcaacacataaatcaatggaacagaatagagaacccagaaataaattcacatatttatggcctattgattttctgcaacagcactaagaacataaactgaagaaaggacacctttttcaataaatattgctggggaaactggatattcatatgcagaagaatgaaactagagccccatctatcataatataaaaaagtaactcaaaacgaatcaaagacttaagtgtaagaccccaaattatgaaactactaagagaaaacataaggaaaatgttctgagcaaagattttatggataagacctccaaaacacagtcaacaaaggcaaaaatagactaatgggattacatcaaactaaacatttctgtgcagcaaagtaaacaatcaacagagtcatgtgacaaactacagaatgggataaaatatttgcaaacggtttctctgacaaggaattaatatctagaatatacaaggaacttaacagcaaaaagccaaataatctgatttttaaaatcggcaattgatctgaacagacgtttctcaaaagaagacataaaatggccactaagtatttgaaacagtgctctatgtgactaatgattagggaaatgcaaatcaaaatcacagtgagatattatctcacgccagctagaatggctatcatcaaaaagaagaaaaaataacaaagctagcaagaatgcagataaaaggaaacttaaaacatttcagcttttactttagattcaggggttacatgtgcaggtgtattgcatgatgttgaggtttcagaatatgattgaacccatctcccaggtggtgagcatagtacccaatatgtggttttgcaacccttccttcctccttccctccctcctcttatactccccagtgcctagcattcctatttttatgtccatgcgtacccaatgtttagctcccacttataagtgagaaatgtagtatttggttttctgtttctgcgttaacttgtttaggataatggcctccagctgcattcatgttgctgcaaaatacatgatttcattcttctttttgtggctgcatggtattccatggtgtatacataccaccacattttctttatccaatctgccattattgggcatctaggttgattccatgtctttgctactgtgaatagtgctgtaatgaacatataagtgcatgtcttttttttggtagaacaatttattttcctgtgggccatatacccagtagtgggatttctgggttgaatggtaattcagtttttattaatagttctttaagaaatctccaaagtgatattcacagcggttgaactaatttacattcccaccaacagtgtataagcgacaaagaaaattctcacacattgttggtaggaatgtaaattagtacagctattatggaaagcagtgtggaagttccttaacaggctaaaaatagaactaccatatgatccagtaatctcgctactggacctatatccaaagaaaataaaatcatatgtcgaagagatacctgcactcccatctttactgtagtttcatttataataatgaagatatggaatccaccgaagtgtctatcaacagatgaagagataaagaaaatgtgggatatatagacaatggaatgcagccataaaagagaatgaaatcctatcattggtggcaacatggatgagcctggaggacattatgttaagtgatataagccaggcacagaaagacaagtttcatatattctcacttacatgtgggagctaaaaaagttgatctcagagaagtagagagtagaatagtggttactagaagctgagaagggtagggagacagagattgatcaatgaatacaaaattatatatatggatagaggaaataagttttagttttagtgttctatagcattgtagggtgactatagtgaacaataacttattgtatattttcaagtactgagaggagaaaattttgtacattaccagcacaaagaaatgataaacctttgagataatggatatgccaattacacagattcgatcattatgcattgtatgcacgtattgaaatgtcacttcaccccataaatatgtgcaattacatgtcatttaaaagtgataagaaaaattagtttttttgatcttattattgactcgtaggaagcttatatattctgaaaagaagtccattttcagatgtgtactaaaaatattttctttcattttatgacttacctttccattttctttaatggaaacttttaaaaacttttaaaaaacaaagttttaaaaaaatctagttaaggtccagtttgttaacttttttctaatatggcttgtgacgcttattccttctgcctagaatgttcctgggatgtttgtggagctaagtcctcgcttccttcaattctttactcaaatatgtccaccctatttaatgtcaactgtccaccgtatttaatgccaccctatttaatatcactaacacctcctcccccctcactcttgacattcattctagtctattttacatttttttctcatagaactcataaatttctagcatgctttataacttacatattcattatgtttattgtttattgtccgtctttgttccagtaaaatgtaaactcctagaagaacagagacctgtgttttgttcactgatgtaccctaagtgctcacaagtgtttctagcacctagtatttgctcaataaatatttgctaggttgatgaattaatgatttctaagctttccttcagcctgaagagttttctgattgtaagattctacttagataatcctaattgtctcagtgactctcaccagtcactcacttctcccacaaggtggcagtctttaccttcaacacaggttctggtagcctcaaatttgagaattaatagctgagttaacctgcttgttttctttgagcccagacagcctgccctatgggaactgacagctgtaaaatttaaaggacgagtgtaattaccctgcaagatctgagtgcttttaggcaagaggatttagggggtgagagttttcctggagagggacacattatgaaggtgatattgcttaattgatggggactttgaaacatagttgctctttgtgagaatggtataggtttagagagaggtgctagcacagagctgtgacacctgaagtaggctgaccgcagacaaattggatttaaccaccaaatatatctgtgttttcatgtcttcctgccccgtgccctcttatctgactcactttaccccagcactggggaataactgtgccctattctggtcctgacccttttgtaccatctagggaaatgagaactcctcttggggtctcagatcctcatttctgttagaaccaatcctattctgtgggtagggccatggttgtaaatttcctgtgggaggcagcattgctttgcaaaaagaacacagtttggcatgtgaggcagctctgccacttggacaaggtgataacgctttagtctctttatttctaaaacagggaagatgctaataccccgcccatggactagtatgagatttaaatggcaggtacttggcacagtggcaggtggtgaatgctctttggtgatcatgactatccctttctcctggtagtgctgcctcctccctctgagcacctggagtcaatccaccttgggtaggtcagagaaggcagaagaaagtggtgggaggtgaactcgacggaatgatgtacagggcgatagggtgagtgagaggtctgggatctattggcaggagcagaatggtaggaaagggaaaacatgccattgaccttgaatcttgacatttgtgcccatcctatgctgtgttgagcctcaggtcaccgtttgcggaggtgagcagaaaactgctaacagatcgaggcttctccagccttctaggtaaactttcatcagtgggttagttgtcttgttcagaagctgatcacggagctttggccaagcataaacactgattatggcagtccaattgtcataatccctttgattctttaatatcaccttcaagattgtttgttattgtcaatgcccccacaacctaagaccaccaggaacacactgtaattgaaaaaggtgggtttgttgctctctgcaagaagggaggacactcagcgtagagactcatgagggtggggcaggttttatccgatgacgttagaaaggacttactgaggatttgggcttgttttaggagatttgggggaaaggttcaaggagactggcttttcctggatgctgccaggaagtagtgggatggtagtaagtctgtggtaggatgtttaaataaatttcctctactgggctggaagaatgagaaggctgaagctgtaataagtaaagaagtggcagtcactcctatcagctatgataaaaggatgtttggctattactttatggtttggatgctatttttgcttgtgttcacatcatggtctatcatggtgataggccacgtacacagtggccttgtctgatgctggtgtcccatggagttgattatgctcagctgaaggacactaaggcccaactgtgggggccaggccagctcctgagtgtcagggggggctgcactgctttgtcattatcaacatctccacatacaatacagcctgtgcatgtgaggtcccagaaggaaggagctaaagcagctagactgggatcactttactcaatttgaggagaggagtgctcttgagggaaccagaggaaggcagatgagctggtctgatctccttttctattggagctctatgcagatagactgaaaatatttgctaaaacaaagagctccatctctagaatacccttagcaggatgtccttgattaaaggattatttctgaaaactaaatccagaatccgtgaggcatgattccctggaagatcatgtaagctgtacaattctctatggaataaattggagacttcatcccttagatccctttgactgtgtgaggaaccccacgaaacctcacttagtgactttattcattcttctgggcctgaaagcatatgtctcatgcaggaaggaaggcaggaccagtggggctttgcaggttgtgccattctctccttgctttgcttgagactctttattacctgtctccctgacattatttgtagtgtgattctgggtgtgttctgtgattcttgtgactaggtatccaattttgcttaaggatgcaaggaagtgtttggggagaaagctctattggaagaggtctgtagtcctagcctccctccccaccccacatttcacatcattagacctcagcacatgggtctggggcaccaacactgtcttacctgttacacagtgtggtctttatctggatgagggatgcgaaaggatacattgtgaccaagagacctgggagaggcacaaaaataacaggtgaccaccaagggtgcttggacctgagatgtttccatttcctaagaccctccaagattctccaacatttggtatagttgcccaggcaatttaacaagaaaatcaaatttttgttatgacccccattgtaatttatgcttatcgcagaaaaattgagactataagaaggagaatagaaggtcacaaaaccactctatactagtccagggatagctattcttacaacatggattgatcagtgtggggtgatttctcctagtgttttttggacagagaagcattgaagatgccctggttttaaggtcttaggatgaaggaattatagttgaacagttcaaaatgatgttatgaattactttcagatttgtttgcttgattgcattagccttgcctggccctacggtaactatttggttccatcatggtggctgagtaggtggctctggaaaaagagctattcaagaaaagcttttctttctctaaaaatattgtagggggctcgccctctgttcttggaagcaacgtttgggatggcctcttgggaggctgtctggtgaagtgtctaggggtatgtggtctggacttggacaggacaagatgcaaattctggctgggatattctagttgtggagtgttgggcaagttacttggtcttctgagtttataggtaaactggagataataggtatgtgtgaatgaggatccaatgagatgcctgtaaaacacttagccagatggctgcgtgaagaaagcacttggtaaatgctaattgttgtggttgttataattagtacaatgattagtcattgctgattgttggctaactggcggtaagaaatgaaagtaaagtaaggcagtagcagctgagggaggtggtggagggaatcaggagacacttggaggttctggttctgcctgagtttaagtgctggggaaaactagttgaataactgctggtctaacatttaacagctgtgtgacctcgggctagtcacatttcctttataaacttcctttttctcatttgcgaaatgaaggggtttcgttaggttacttctcatcacccctggttgaccattagaatcgtttgggagacctttttagaaattcttggttctggggtcttccattttccccattctcacttggtgggtctgaaagcaggcactgcagcttttccaaagctcttcaggtgaccttgaagtgtggccagggctgagaacctctgacttccaacagcacttctggtttaggaaggagcaaatcaccggcacagaatgagctctcaggaacggctgctgagctagtaattgccgtgacactgtctccctgtcccaactgcaggcacccctagacgtctcctgatgaagacttccaattttggaacagaagaatctttgaaaaaaatattattgaacttccagaaatgattcattccttctctgctccttctttagttggaaagatctgcccccatccctgtctactgcagtcccaatccctttttatttcaacatatatatccaaaccaacaaaaaaattgactcgcacaaccaaggtgaggtgtttggctttaaggataaaataaatagtttcataaaacctgcccccagatttctcattgcctctactcattttctctaatttgtagggcacactgaaagctcggattcataagatgtagaaagggcagagagttaagttacaaactcttcctaggtctgtttcaactctaacgttctatagctctgctccgtctaaacaaggaattctgttaaatttgtaacctggactttcttgaatactgaggtaatgtttcttgaagtaggatatatatacccaagaagaataaaaataattctggaggtgtcttaattctctgtgggactcaataaaagttttggtgattatatataaacacacttatgaaagcatctggtacatgtaggtgctcagtgcacatgaatttctctttcctgccagatcttttgtagtggaaaattatcttattcttccatctttgtctgcaaagatgctgctaaggaaagatgtagaagagttttacaagggagttggagtatgggaacaggaagttcccaagaaggccactgcattaatagaattgaaacaagatcccctaaaggaaaatcgctgccaaatctcttttctctaaactatccaaaatggtgccccataaattttcattgacattgaagtacataatgtaataagcttttttttccttaaatatataatgtacggagaaaaccaggttgataatggtttcctggcatagctttcaaaggcaagtgtggatgaagtggaaatatggtgcacagatattggaaagaaaccgctgttgaactcttcacattttcatgtataacccaatgattctcaaacctaaacttgcatcagaattgcctggagggcttattaaaacatgattgttggatgccacccttgcattaattaattacacctgcaactgttctatttttaaatggtcacattttaaggtactgggctgaggacttcattatgtgagtttcaaatgggacataattcaacccctagcccaatcctagtgagtggtgagtggtatctcttcgttttgatttctacttccctagtgactaatgatgttgagcatttttatgtgtgtttattagccatttttatatctcttatgaaaaaatgtgtataaaattattggcccatttgttaattgggttatccatttattattgaattataagagctctttactactctggatgcaagtcctgaaacagaaataatatttacaaatattttaatccattctgtgaattttattttcactttcttgatggcgtcctttgaagaacgtaggattttaattttgataaagtgtaatttatgtattttttcttttgttgctgtgcttttggtatcatatttaagaaataattgcctaatccaaggttatgacaattttttattctatgtttgcctctaagaattttctaattttaccttttatatttaggtctttcattcattttgagtcaatttttgtatatggtgtaaagtatgggtcctaatttattcttttgcatgtggatatcttgttgtccctgcaccatttgttgaaaagtgttgttttttttttcccattgaatggccttggcactcttgtctaaaattaattgatggtaactgtaagactttatttctggactctttattccattgatctatatttctatcattgttactgagcaatgtgcttgctgcctgacagatagggaagccaatattatggaactggtttttgagaaaagcaaaagctttatcgtgaggttgacttgcaaggaaacaggatgcaaagctcaaatctgtctccccttctgggatctgggacaagttttatgggttagggagggcaagctggtatgcagaagcactggtagggcaggtttcaactggaagtactttaaacaagaccatttatggtaaggtatggtaagggtcttaacactggacatgcctgggctcaggtttcttgcttttaaaaatgtttgggccctcaggttccagtcatgtcttgaccattttcttctgtggtggggcaggagaggaatttttcttctgggtgttattcaaggttgaggtcttcttttctgcattgcttcggctgcatgacttaacaactttttgactttgtgcctgttaaataacttgacatactattatcatcagagtagggccagttagaactggtcctgtgattacatcattatgccagtaccaattatcttgattactgtagcattgtagtaagttttgaaatcaggaagtttgtgtctttcaactttggtcttctttttcaggatttttggctcttctgtgttccttacatttccatatgaattttaagttaaactgtcactatctgcaaaagaaggaactgggatttttatagagattacattgaagctgtaaatcagcttggagaatactgtcatcttaacaatattaagtcttctggccgggcacggtggctcacgcctgtaatcccagcactttgggaggccgaggcgggtggatcacgagctcagaagttcgagaccagcctggccaacctggtaaaaccccgtctctactaaaaataataataataaaaaactgggcatggtggcatgtgcctgtaatcccagctactcaggaggctgaggcaggagaatcatttgaaccctggaggcagaggttgcagtgagccgagatcgcaccattgcactctagcctgggcaacagggcgagattctgtctcaaaaaaacaaaaacaaaaacaatattaagtctcctgatccatgaatgtagaatgtttttccatttgttcaggtcttctttactttgtaacagtgttgtgtatttttcaatgttccagtcctgtaattctttgttatatttactcctaagaatattaattgttttgctgctattataagtggaattgtttaaattttgattttatatttttcattgatagtatatttttcattgatagtatacaattgatttttgtacactgattttgtaacctgaaaccttgctgaccatgtttactcgttctaacagtttcctttttgtggatttcttataattttctatatacagtatttcatgtcatccatgaaggggataggtttacttcttcttatctaatctggatgagtttagtttatttttcttacctaaattccttggctagaactccaatacaatgttgaatataagtaatgaaatcagacatctttggactgtacttgattttaagggggagcatccagtcttttgccattatgtataatgttagctgtggggtttaatagatgaattttatcaggttgaggaaattttatttctaatctgctcagtgtttttttcatcacaagagtgttggattttgttaatatttttgtgtgtctattgagatgatcatatggtttttgtcattctacaaaatacagcacattaaattgatggatttttacatgttaatttttttttaaattttactttaagttctgggacacatgtgcagaacgtgcaggtttgttacataggtatacatgtgccatggtggtttgctgcacctatcaacctatcatctaggttttaagccctacatgcattaggtatttgtcctaatactctccctccccttgctccccacccccgccgacaggccccggtgtgtgttgttcccctccctgtgtccatgtgttctcactgttcaactctcacttatgagtgagaagacgtggtgtctggttttctgttcctgtgttttttagctgagaatgatggcttccagcttcatccatgtccctgcaaaggacataaactcattcttttttatgactgcatagtattccatggtgtatatgtgccacattttctttattcagtccatcatttatgggcatttgggttggctctaagtctttgctattgtaaatagtgctccaataaacatatgtgtggatgtgtctttatagtacaatgatttatactcctttgggtatatacccagtaatgggattgctgggtcaaatgatatttctggatctagatccttgaggaatcgccacactatcttccacagtggttgaactaattcacactcccaccaacagtgtaaaagcattcctatttctccacagcctcaccagcatctgttgtttcctgactttttaatgatcgtcattctaactggcgtgagatggtatccattgcgattttgatttgcatttctctaatgaccagtgatgataagctttttttcatatgtttgctgggcacataaatgtcttcttttgagaagcatctgttaatacccttcgcccactttttgatggggttgtttttttcttgtaaatttgtttaagttgtagacttaggatattagatctttgtcaggtggatagattgcaaaaaatttctcccattctgtaggttgcctgttcactctgatggtagtttcttttggtgtgcagtatctctttagtttaattagatcccatttgtcaattttggcttttgttgccattgcttttggtgttttagtcatgaagtctttgcccatgcctatgtcctgaatggtattgcctagattttcgtctagggtttttatggttttaggttttacatttaagtgtttaatccatcttgagttaatttttgtataaggtgtaaagaaggggtccagtttttgttttctgtatatggctagccagttttcccagcactattaattaaataggtaatcctttctccattgcttgcttttgtcaggtttgttgaagatcaggtggttgtagacatgtggtattatttctgaggtctctgttctgtttttgttttttgttttttgttttttgttttttttttttgagatgagatctcgctctgttacccaggctggagtgcagtggcacgatctcggctcactgcaacctccgcctccctggttcaagcaattctcctacctcagcctcctgagtagctgggattacaggcatgtatcaccgcgcctggctaatttttgtatttttagtagagatggggtttcaccatgttggtcaggcttgtctcgaacttatcacctcatgatctgcctgcctcagcctcccaaagtgctgggattacaggcgtgagccaccgtgcccggccaaggtctccgttctctttcattggtctatatatctgttttggtactagtactgtagttactgtagccttgtagtacactttgtagtcaggtaacgtgatgcctccaacttcgttctttttgcttaggattgtcttggctatacgggctcttttttggttccatatgaaatttaaagtagtttttttctaattctatgaagaaagtcaatggtatcttgatgggaatagcattgaatctatcaattactttgggcaatatggccattttcacaatatttattcttcctatctatgagcatggaattttttctatttgtttgtgtcctttatttccttgagcagtggtttgtagttctccttgaagaggtccttatgtctcttgtaagttgtattcctaggtattttattctctttgtagcaattttgaatgggagttcactcgtgatttggctctctgcttgtctattattggtatataggaatgcttgtgatttttgcacactgattttatatcctgagactttgctgaagttgcttatcagcttaaggaggttttgggctgagacgttggggttttctaaatatacaatcatgtcatctgcacacagagacaatttgactttctctcttcctatatgagtacactttatttatttcttatgtctgattgccctggccagaacttccaatactatgttgaacaggagtggtgagagaggacatccttgtctcgtgccacttttcgataggaatgcttccagcttttgcccatttagtatgatatgggctatgggtttttcagaaatagctcttattattttgagatatgttccatcgatacctagtttattgagagtttttagcatgaagggatgttgaattttattgaaggacttttctgcatctattgagataatcatgtgatttttttcattggttctgattatgtgatggattatgtttattgatttgtgtatgttgaaccagccttgcatcccagagatgaagccaacttgatcgtggtggataagctttttgatgtgctgctggattcagtttgccagtattttagtgaggatttttgcatcgatgttcatcagggatattggactgaaattttctttttttattgtgtctctgccaggtttcggtattaggatgatattggcctcataaaatgacttatggaggagtccctctttttctattgtttgcaatagtgtcagaaggaatggtaccagctcctctttgtacccctggtagactgcatgttagacgagataatatgtatgaactacctggcatataatagatgcttcctaaataagattctaaaaaataattatgctccaaaaatatttttaaaatcaaataatttatgttttattttctgtgttttatctcagacatgtagactgccaaagtgtatgggatgctttcaagggtgcatttatttcaaaacatccttgcaacattactgaagaagactatcagccactaatgaagttgggaactcagaccgtaccttgcaacaaggtaattgggggcatgccattgattttaaaactggggataaaagccaatggtaacaattcataggtccaaatttttattagaatgaaggaagaggaaaaatccagacattatagtgtgagtgtggttggtaggaatggaatttgcaggccattgaggggccatgatataattaagatttaggacatctggagaagggagctaagagagagaaatagggatacagagataggaaaggggctttggccaaaaactaggcagaaaaaacctaacaccaaacccaactcgaacaaacaaattaacacgacctatataataacaaaactttcccctgacctatgataataatagtagtagtagtagtaataacagcaatgccaagttacacttgcagactgcttcttctttttcttgcttacaaaagactctcctaatccttactttcttaggccttcatagccattctctggaatgggcacatcaggtgtcagcatcccaatttcaccagtgagaaaactgagggttggtgtgtttaggtgaccagtgttgcccaagtttgacaggcttcaaagtgaccagtttaaatgtaaatggtatgagacctggagccacagaggcctggattctaatacattggttatattggaaaagctctatcagagtgcaccttttctatagccaatgtttaaggcaaaattccatgtgcctaaaattttctttgtgaagcccttaaatccatccagaaattacagcctctcattccattgttagtgagctggagtcattgtgaaacttctccattcactaggcgtgatgccctatgcagagaaggtgtttggcaaataataacccaggctgacatttgtcaaataagtgactatgcgatggatagtatgctaagcaatttacttgcatttatctcagttaatttccctagcaccccattagtttatttcagtcattatcattaccattttacaggtgtagaaagtggggcttagtgatgttttggttgctcaaggtgaaacacctgataagtgatgatgatgctgggcttcaataagggctgggattttagggcccatactttaaaccagtatccttcactgactcccattaagaatgaatagggggaggagccaagatggctgaataggaacagctccagtctgcagctcccagtgagaccaacgcagaaggtgggtgatttctgcatttccatctgagatcaggtttcctcgtgtgtctacaccaccagggccctgggtttcaggcacaaaaccgagccgctgtttgggcagacaccaagctaggtgcaggagtttttttcgtaccccagtggcgcctgaaaccccagtgagacagaactgttcactcccctggaaagggggctgaagccagggagccaagtggtctcgctcagcgggtctcactcccacggagaccagcaagctaagaaccactggcttgaaattcttgctgccagcacagcagtctgaagttgacctgggatgatggagctgggtggggggaggggcgtccgccattactgaggctttaataggcggttttcccctgacagtgctaagggggctgggaagtctggactgagtgtggcaacgtggttgtggccagactgcttctctagattcctcctcactgggcagggcatctctgaaggaaaggtaacaaccccagtcaggggcttacagacaaaacctccgtctccctgggacagagcacctggcagaaggggcagctgtgggcacagcttcagtggatttaatcattcctgcctgctggctctgaagacagcagctgatcctgacaagagggattctcccagcacagcacaccaactctgctaaaggacggattgcctcctcaagtgagtccctgacccctgtgtctcctgactgagagagaccacccaacaggggtcgatagacacctcatacaggagagctccggctggcatcaggccggtgcccctctggaatgaagcttccagaggaaggagcaggctgtcatctttgctgttctgtagcctccactcgtgataccttcaggtgcgggaggaacccaggtgaatagggtctggagtggaccccctgcacactgcagcagccctatggaagaaagggcctgactgctaaaagaaaaaacagaaagcaacaacatcaatgaaaaagaccccacaaaaacccatccaaaggtcagtagcctcaaagatcaaaggtagataaatgcaagaagatgagaaagaatcagcacaaaaatgctgaaaactcaaaaagccagtgtgcctcttctcctccagatgatcttaacacatctccaacaagggcatagaactgggctgaggcccctaaaaagagatgagttcatgtcctttgcaggcatatggatgaagctggaaaccatcattctcagcaaactatcacaagatcagaaaaccaaacaccacatgttctcactcataagtgggagttgaacagtgagaacacatggacacagggaggggaacatcacacaccagggcctgtcaggggtgggtgctaggggaggataacattaggagaaatacctaacgtaggtgacgggttgatgggtgcagcaaaccaccatggcatgtgtatacctatgtaacaaaactgcacattctgcacatgtaacccagaacttaaagtataaaaaaacaaaagatactagctacatttacccaatgttaaaaaaaaaaaaagaactgggctgaggctgaggtggatgaattgacagaagtaggcttcagaagatgcataataatgaaattcactgagctgaaggagtatattctaacccactgcaaagaagctaagaaccatgataaaacataggagctgttaaccagaataactggtttagagaggaacataaatgacctgatggagctgaaaaacacaacacgagaacttcaagatgtaaacacaagtatcaataaccaaatagaccaaacagaagaaaggatatcagagcttgaagagtatcttgctgaaataagacaggcagacaagattagagaaaaaagaatgaaaaggaacaaacaaaacctctgagaactatgggattacataaaaagaacctatgactgattggggtacctgaaagagacaggaagaatgaaaccacgttggaaaacacacttcaggatatcatccaggagaacttcttcaacctagcaagatgggccaacattcaaattcaggaaatccagagaaccccagtaagatactccatgagaagatcaaccccaagacacataatcatcagattctccaggtcacctataaagggaagccaattagactaacagcagacctctcagcagaaacctacaagccagaagagattgggggccaatattcaacattcttaaagaaaataatttccaaccttgaatttcatatctagccaaactaagttcataaatgaaggagaaataaaatctttttcagacaagcaaatgctaagggaattcgtcaccaccaggcctgccttgcaagagctcctgaaggaagcactaaatatggaaaggaaaaaccattatcagccactacagaaacacaccgaagtacacagaccaatgacactatgaagcaactacgtaaacaaatcttcacaataaccagctagcatcatgataactggatcaaattcacacataacaaattaaccttaagtgtaaatgggctaaatgtcccaactaaaagacatggaatggcaagctggatagtcaagatcaattggtgtgctgtatacaagagacccatctcacatgcaaagacacacataggctcaaaataagggatggaggaatatttaccaagcaaatgggaaacagaaaagagcaggggttgcaatcctagtttatgacaaaacagactttaaaccaacaaagatcaaaaaagaaaaagaagggtattacataaggataaaggggtaaattcaacaagaagagcaaactatcttaaatatatatgtgcccaatacaggaacaccgagattcataaaacaagttcttagagaccttcaaagagatttagatacccacacaataatagtgggagaatttaacatcccactgtcaatattagacagatcatcaagacagaaaattagcaaagatattcacgacctgaactcagctcaggatcaagtggacctgatggatatctactgaagtctccatgccaaagcaacagaatatacattattattggtgccacatggcatctactctaaaattgatcacacaattggaagtaaattactcctcagcaaatgcagaagaactaaaatcataacaaacaatctcacagaccacagcacaatcaaattagaactcaagattaagaaactcactgaaaaccatgcaattacatggaaattgaacaacctgctcctgaatgactcctgggtaaataataaaattaagccagaaattaagaagttctttgaaactaataggaaaaaagagacaatgtatcagaatctctgggatgcaactaaagcagtgttaagagggaaatttatagcactaaatgcccacatcaaaaagctaggaagatatcaaattgacatcctaacatcacaactaaaagaactagagaaccaagagaaaacaaatcccaaagctagcagaagacaagaaataaccaagctcagagcagaactgaaggagatagagacacaaaaatcccttccaaaaaaaaatgaatgcaggaggtggttttttgaaaaaaaattaatagaatagatggatcgctagctagactaataaagaaaatagagaagaatcagatagatacaataaaatgataaaggggatatcaccacagaaatacaaacaaccatcagagaatactataaatacctctatgcaaataaactagaacatctagaagaaatgaataaatttctggatacatacaccctcccaagactgaaccaggaagaagttgagttcctgaacagaccaataacaagttctataattgaggcagtaataaataccaaccaaaaaaaaaaaaaaaaaagcccaggatcagacagatttataactgaattttaccagatttacaaagaggagctgataccctttcttctgaaactgttccaaaaaattgaaaagtaaggactcctccctaactcattttatgagactagcaccatcctgataataaaaactggcagagatttaaaaaaaaaaagaaagaaagaaaacttcaggccaatatcctgaagaacatcgatacaaaaattctcaacaaaatactggcaaactgaatccagcagcacatcaaaaagcttatccaccatgatcaagttggcttcatcctcaggatgcaaggcaggttcaacgtacatgaatcaataaatgtaattcattacataaagagaactaaagacaaaaaccacatgattatctcaatagatgcggaaaaggccttcgataaaattcaccatcccttcacgttaaaaactctcaataagctaggtatcaaaggaacatacctcaaaataataagaaccatttatgacaaacccacaagcaatatcatactgagtgggcaaaagctggaagcattccccttgaaaaccggcacaagacaaggatgtcctctctcaccactcctattcaacatagtattggatgttctgaccgggacaatcaggcaagagaaagaaataaagtcttttcaaatggaaaaaaggaaataaaattgtctttgtttgcagatgacatgatcctataactagaaaaccggatcatctcagccccaaagcttcttaagctgataagcaacttcagcaaagtctcaggatacaaaatcaatgtgcaaaaatcacaagcattcctgtacaccaacaacacgcaagcagagagccaaatcatgaatgaactcccattcacaaagggaataaaatacctaggaatacagcaaacaagggaagtgaaggacctcttcatggatacctataatccactgctcaaggaaatcagaaaggacacaaacaaatagaaaaacattccttcctcatggataggaagaatcaatatcgtgaaaatggccatactgcccaaggtaatttatagattcagtgctattcccattaaactactattgacattcttcatagaattagaagaaactattttaaaattcatatggaaccaaaaaagctcatatagccaagatgatcctaagcaaaaagaacaaagctggaggcatcgtgctacccaactccaaactgcactacaaggctacagatgccaaaatagcatggtacttgtacaaaaataaacacatagaccaatagaacagagtagagatctcagaaataaaactacacatctgcagccatctaatctttggcaaacctgacaaaaacaagcaatggggaaaggaatccacatttaataactggtgcttgagaactacctagccatatgcagacaattgaaactggaccccttccttgcaactcatacaaaaattaagatgaattagagacttaaatgtataacccaaaactataaaaaccttagaagaaaatctaggcaatatcatttgggacacaggcacaggcaaagatttcatgaaattgccaaatgcaattgtaacaaaagcaaaaattgacaaatgggatctaattaaactaaagtgcttctgcacagcagaagaaactatcatcagagtgaacagaaaacctgcagaatgggagaagatttttgcaatctatccctctgacaaaggtctaatatccagaatttacaaagaacttaaacaaatttacaagaaaaaaataaacagccccatcaaaaagtgggcaaagaacatgaacagacacttctcaaaagaagacatccatgtggccaacaaacatatgaaaaaaagctcaacatcactggtcattagagaaatgcaaatcaaaaccacaatctcatgccagtcagaatggcattattaaaaagtcaagaaacagcagatgctggtgagattgtggagagatagaaatgcttttacactgttggtgggaatgtaaattagttcaaccattgtggaagatagtgtggcaattcctcaaagatctagaactagaaataccgtttgacccagcaatcccattactgggtataatagaaatcattctattataaagatatgtgcatgcatatgttcattgcagtgccattcacaatagcaaagacatggaatcaactcaaatgcccatcagtgataggctggataaagaaaatgtggtacgtatacaccatgaaatattatgcagccataaaaaggaacaagatcatgtcctttgtagggacatagatggagccagaagccacatcttcagcaaactaacacaggaacatgcaaatgctgcatgttctcacttataagtgggagctgaacagtgagaacacatggacaccaggaggggaaaaacacacactgtagcttgttggggttggggtgaggggagtgagaacattaggacaaatagctaatgcatacttggcttaatacctaggtgatgggttaataggtgcagcaaacccatggcacatatttacctatgtaacaaacctgcacatcctgcatgtataccctggatatacatgcccaggatatacattttatttaaaataaaaataaaaataatagattcataaaacagaatataattctgaactttgactccctgtacctttaagagggacccttaaatttaaaaatctattgtattttttttttagtaggggtagggaatatttagggaatttggaaggggttatatagttctttaagaatcaaatagcacatcttcctgaaaatagcacgtagacaaagtttttttggagataaccttaggaatatcgtaactctctgatgccacctccatatgtgatcctatgttgattataagattttgatcagtggctttcagacttttttgactgcaacctagaataaaagattcatttacattgtgacctagaacacacacacacacacacactctctctccgccactctcctgcacacagaaatcattgatgcttacaacaattcttactcttactatgggtgatttactttgatatgctctgttttttttttcatttacaaaactgtggattaattttttttgacatgctaaattgatctcagtaatagattgtatttattcttccttagattcttctttggagcagaataaaagatctggcccatcagttcacacaggtccagcgggacatgttcaccctggaggacacgctgctaggctaccttgctgatgacctcacatggtgtggtgaattcaacacttccagtgaggctctgggccctgtgggattgcccagggatgtggagggtgaacagagtgacttctgctggaggccctgaatgattagtgtggaggacagagccacaggcacccatcctgatgccatctatacttatattagtccatttgtgttgctattaaggaatacctgaggctgcgtaatttataaagaaaagaggtttatttgactcacagttacgcaggctgtacaagaagtagggtaccagcatccacttcgggtgaaggcctgaggctgtttccactcatggagaaggggaaggggagctggcatttacagagatcacatggtgagggaggaaagcaaggagaggtcaggggaggtgccaggctgtttgtaatgaccagctgtcctgggaactagtagagtaagaactcattactataaggacagcaccatgccattcgtgcaggatcatccctatgacccaaacacctcctactagtcccgagctccaacactgggggtcgaatttcaacataaggtttggagagttaaatatccaaactatagcactacccttaatggcaactcaggctgatataaagtagcattccctgttttcttgaaaaattgacttcagagttggggattgcccatgctccctaattcccttcttttgagtgctcacatagcctgcttccgaattcttggtattttgctctctgtaaggtcatcattcaggtccaaagaagtctagaacaggatgaggtctcagtgggacctagaccaaggttcttgctcttcagaatcatcacagtagccatggactggactcttccatctcaggcactggctttgccatcatttttcagatgtagccttatcctgcccagaaagactcaacacctcaccaggggaagggatttcctacaaccaaaaccctactgcagttttcacttcttttttttttctttttgtttatatggtggatatttttactttatatagttttattcttatttttactgtttttcattgtttgtttttaaaagcttatcttattatagcttctttgtcccaggtttgcattactttcaattacaaaaataaagcatgattatttgaaaaaaaaatacttgcacattacagaaatgcataaaagcaaaaagcaaatgtcactctgaattttcccttcacctcctacctccgcatcacttctcaaagggtaactattatcagcaatttgatatagatctttctagacttttcctatgctaatgtaaacatatatatttaaaatgtacacgcgctgttgtgcaacttgctttattcacttaaaattggtaggtataaagatagctatcctcttttaaaaggctttatcattaagaatcctattaatggatattaagttgctttagttttggttgctattatgtcattattgtaagaaacacttttgtgcgcacacacacacacacacacacacacacacacacacacacctgcatacttgaacgataaatttttataaatgaaacttcaatgttaaaggataaattgtaatagaaactggtaacatgtcatttaaaagatggtaactataccctcatcaagagtatatatatgaggccaggcacagtggctcatacctgcaatcccagcactttgggaggtggaggagggaggatcacttgagcccagtagtttaagaacggcctgggcaacatagtaagaccccatctctattttacactaaaaaaagaaaaaaaaagaatgtatatgagatagtttatttacctatatccccactaacaccaggtattgttactttaaaatttttggctcatttcagaagaaaataatacctcaatttagtgtgaagttctttgatggtgaggctactatatatacataaatggtagattttctgtttcttctgtaagctggcagttcatatattttgaccatctgtatgcggtatctattattttctaattagtagaagttctttataaattaataagagctacgatgtattaagtacttacaaagtgccagtgttccatgtgctacgtaagtagtcactcatttaatcctccacagccccatgaggtcatatggtgatcccattttagagataggaagtctgaggcatggagttaagtaatttgccagccagtaagtggcaaagcaagaagcaaagtttctcagactaacttgagaaactttgctcttaactgccatgtttttctgcccactttctggctcaagttggcgaatatatttttcttattttggactttacacggtgtttatggtctgtcttttgccacccagaaatgcagaaaacctgtctgttctcttccttatagcttctgtgtttcatatcttccttaaaaagatcttcttagagaagcattcttctgtattttcacctactatttttactttcacaatgtttaaaatattttccatatttagatctgagtcttcccacctagaatatggtaatataaatatgtttttccattaatttttttagattttacagtttttcccatgttccatgttttcctttttaaatttcccttttaacaatgactgttttattggtcattcatttaacatttagcttttaaatgtatttacagtagacttctctccttttgttttattttttaatttgttcaatttttcttgaaataaagtagagaaaatgaaataatttatttttaagaactgatttatttacagttcagagttccttatttttgccttcttttaaattgaattatgtatatgtagttttatttatctacattctaatactttggcctcaatttttaatttcttcttattttatagattatctttcaagttcctgatgtatatgtatttatttactttttattctaagttgacaatttataattgtatgtatttgtggggtgaaaaatgaatttatgaatacaatgtgggataattaaatcaaactaattaacatatccaccgcctcaaatactttttttagtttttgagacagggtctcactctgtcacccaggctgaggtgcagtggtgcaatcacaattcactgcaaccttgacctaccaggctcaggtggtcctcctaccttagcctcccaggtagctgggactacaggtgcctgccaccacacttggctaattttttgtattttttttagagacagggtttcaccatgttgcccaggctggtcttgaactcctgggctcaagcgatctaccctcttcagcctcccaaagtgttgggattacaggtgtgagccaccaggcccgacctcaaatacttattttttgtagtgagaaaatgtgaagtttactgtcttagcaatgttgaaatgtacagcacactattattaactacaatcaccatgctgtgcaataaatatttttaaaaaccctttctaactgagattttgtactctttgaccatcatctccccattccttccaacttctggtctctgtatccaccattctattatctgcttctatgaacttgattgttttagattccatatgtattaggacatgcagcatttgtctttctgtgggtggcttattttacttagcatattgttttcttgttccatctatattgtcacaaatgacagaatttctttctttttaaagtctgaatagtattccattgtgtatatataccacactttatccattcgtctattgatggactcaggttgattccatatcttggctattgtaaatagtgctgcaatgaacatgggggagcaggtatctctttgacaaactgatttgaaatcttttgggtaaatacctagaagtgggattgctggatcatatggtagtattctatttttagtttgttgaggaactttcatcacattttccataatgggtatactaatttactttcccaatagtgtacaaataaccccctttcttcacattcttgccaacacttgttatttatctttcatctttttgattatacccttctgacaggtgtgagatgatgtctcattgtggttttaatttttgtttccctattaattaggaagcttgagcattttaaaatatatttgttggccatttgtatgtcttttgaaaaatgtctattcaggtcctttgcccacctttaaattgattttttttcttgtttttgagttgtttgagttccttatgtattttgtttttgtttgttttttaatttttaatttttgtgcatacataataggtgtatatatgggatgtgtgtacatgagatgttttgatatagatatacagtgcataataattacatcatgaaaaatgtctctttccccataagcatttatcttttgtgttacaaacaatccaattttattcttttagttattttaaaacaggggtgtccaattttttggcttccctgggccacattggaagaattgtcttgggccacacataaaatacactaatactaatgatagctgatgggctgaaaaaaaatcgcaaaaaatctcctaatttctaagaaagtttatgaattgaacttatgtgttgggctgcattcaaagctgtcatgggctgcttgagacccatgggccatgggttggacaagctttttttaaaatgtacaacaaaattgttattgactacagtcaccatactgtgctatcaaataataggtcttattcattctaactattttttggtaaccatccccacctccccacaatgtcttgctacacttcccagcgtctggtaaccatttttctattctccatgtccatgagatcagttgttttgatttgttggatgctaaaataagtgagaacatcctatgtttatctttctgtgtctagcttatttcacttaacataatgacctccagttctattcatgttgttgcaaatgacaggaacacattcttttttgtggctgaatagtactccattgtgtataaataccacattttctttatccatttatctattgatggacatttaggttgtttccatatcttggctattgtgaacagtgctgcaataaacatgggagtgcagatatctcttccattgactgattttctttctgttgggtatatatccagcagtggcattgctggatcatataatagctctatttttatttttttgagaaacctcaaaactgttctccatagtggttgtactaattcacattcccaccaacagtgtacaagggttcccctttctccacatcctcatcattatttgttattgcctgacttttggatgaaagccattttagctggggtgagatgatatctcatgatagttttgatttgcatttatctgatggtcaatgatttgaacacattttcatatgcctgtttgccatttgtatgtcttcttttgagaaatatgtattcaaatcttttgcccatttttaattggattattagatttctttcctatagagttgtttgaattacttatctattctggtttttaatgccttcttgaatgggtagtttgcaaatattttctcccattctgtgggctctctcttcactttgttgattgtttcctttgctatgcagaagctttttaacttgatgtgatcctgtttgttcattttgctttcgttgcctgtgctcatggggtattgctcaataattttttttgcccagacaaatgtcatggagagtttccccagtggtttcttgtagtagtttgcagtagtttcatagtttgaggtcttagatttaaatctttaatctattttgattttatttttgtatgtgatttgagataggggtctagtttcatttttatccattgagccactctgtgccttctgattgtagagtttagtccatttacatttgacgtaaatgttatatttttaagtaaggacttactcctgccattttgttacttgttttctgtttgttttgtggtcttctcttccttctttctttcctttctgtcttcctttcagtggaggtgattttttcagtttcctgctttttattttttgtggaactgttatatgtttttgagtttgaagttaccatgaggcttaaaaatagtatcttatatcccattattttaagctgataacaacttaacacagtttgcataaagaaacaaagacagcaaacagaaagctaatacaaactctataccttaacttcattctcccactctaaaactttttgttgtttctatttatgtcttattgtactttatatgtcttgaaaagttattgtagttattatttctgattggctcatcatttagtttttctacttaagacaagagtagtttacacgtcatagttacagtgttataacattctgtggttttctgtgtacttactactgccagtgagttttgtaccttcagatgattaaattgctcattaatatccttttctttctaattgaagtactccctttagcatttcttctaggacaggtctcgtgttaattaaatccctcaccttttgtttgtctggaaaagtctgtgtttctccttcaagtttgaaggatattttcaccagatatactattctagagtaaaaacttttttttttgtctttcagcacttcaaatatgtcatgccactctcatctggcctgtaaggtttccactgaaaagtctgctgccagatgtactgaaactcccttgtatgctatttgtttcttttctcttgctgcttttaggatcctttctttatcttggacctttgggagtttgattatcaaatgctttggggcagcattcttgggttaaatctgcttggtgttctataaccttcttgtacttgggatattgatatctttctctaggtttgcaaagttctctgttattattgctttgaataaactttctacctgtatctctttttctacctcctctttgacaccaataactcttggatttgcccttttaaggcaattttctagatcctgccagtgtgcttcattgttttttattcttttttcttttgtctcctctgactgtgtattttcaaatagcctgtcttcaagctcacaaattctttcttctgcttgatcagttctgctataaaaagactctgatgcattcttcagtgtgttatttgtacttttcagctccagaatttctacttgattctttttaattatttccatctctttgttaaattcatctgatagaattcttgaatttctttcagtttcctcaacatggctattttgaattctctgtctcacatatctctgtttcttcaggattgatctctgatgtcttatttaattcatttggtgaggtcatgtattcctggatggtcttgatacttgtagatatttttctgcatctaggcattgtatttattgtagtctttacaacctgggcctgtttgtacttgtccttggaaaggctttccagatattttgaaggactcggatgttgtgatctacgttgtatctgctgtagggggccctgcaagcctagtaatgctgtgggtcttgtacacactcatggaggtaccaccttgatggtcttggacaagatctagaaggattctctggattaccaggcagagattctttttctagtccctttactttctcccagagtctctctctttctgttctgacccacataaagctggtgacacactccaccgcaactaggactttgctgggtaagacttgaagccagtacagcacttgcccagggcctgcagtaaccacttcctagctgccatctatatttgctcaaggctctggggctctacaatcagtaggtgagaaagccagccagacccgtgttcttctcttcaggttggcaagtttcccaaggccctgggttggtccagaggtgccatccagaagccagggactagagtaaaaaaccttagaagtctacctagtattgcattgtactgtgactaagctggcattcaaaccacaagacacagtccttcccatgctgtcttccccttttctaaggcaaaggagcctcacctcatggccaccaccaccacaggcccacagggagtactgccagtgtactgttaatattccaaggcccaaggactcttcagtcagcttgtggttaatgctgcctggcctgggactcacccttcaaagcagtgggctcccctctggcccagggcaggcccagaaatgctatccaagagccacatcctggaatcagggaccccaagcccagttggtgctctacctctctgtggctgtacctgaagccagcaagtcacagagtctcacccaaggcccatgacatactaattgggtatcacttctggtttttcagggcccaagggctcttcagttagtaggtgatgaattctctccagatgtcgttgtgaagataaaagaggtttattttcatgaaaacatatatactttaaagcaccttatgaaatgtatgtccattccaccatcaacatttttacctctgttgggaagataattccttttgactccacaataattatttatatctacacatgggaatgtttcttttttatttgtgtggttttggttttaaagcatttaatcattacaagactcctagaattactatatcatgtgctctctgaaggcaaagttcccatctaatttttctattttatctttctacctctaagacctaaaactcaataaatgtgcattaaggcagatatccttgggagaagtgacacagaaactatgtattcatgctctgtgtccattgtacttcactcagggttaagactgccttgatgagggcaagtgtaggaagactctgaggccatctgagagtaagtggtgaagacttaagaagtggggcaggaaacacagcaagagagagttgtcaggaagcagaaaagcagttggcaaaagcaaccactgaaggactggttttacctctaattcttcctggactggggataatcctagagggcttgtctctgtcagatgaacttttggtagcatttcccagaaccatgactcaaaacttgccactgtgttcccatctgggatttggaagataaggtaagaacttggaaagaattcaggggacacttagttaaattgggtcaaaatgtgtccattctccagcctccgtcttggcagtgacacattggaaaatggttccactatgactgaacagccagggaagagtacagcttatttatactctctgttttccactttattttctacaaactatgtcttttagaaataaactatcaatcttgcccagactggagaaaggactgcagcaacaaccctgtttcagtattctggaaaacggtttcccgcagggtaagtaccaagtagtgaaattctagagctttggagaccacagaacttaagacgttactcagtcagtgcttggttttaacacttttggattacaaatacttttaggaatgaaaatataggattcattcctgagaaaaaggttcagatgcacatgccagaaaatttacacatccaattttagaacattcttagagggtccatgggctccagttgcagaatctttgcacgtacccactctgactttggctaccaggaacctggggcttggtttaatcctctgattcaggtattagtcaatcttagatacctgggacagtcgtaacaatctacatgtatagaccccttactatgtggcaggtacggtcctcagatctttacatgaactagtaacttgcatcttcaccagaaccctgtgaagcaggtgccatgagtattgtaaccatttaacacataacgtgaaggtacaagtaaacaaggaatctactaaatgtacagaattagtaagaggcatatgtgggagtttatcccaagctgtctgactccagattcagaatctaggctgggaaaaactcaccactccaccctctacctattttttttaaaaaaattgatacataatagttttacatatttatggggtatatagtgatgtggtgatacatataaggtatagtgatgaaatcggggtaattaacatatctgtcatctcgaacatttatcatttctttgtgttgggagcattgaatatcccccttctggctagctgaaactacatattattaactgtagtcctcctacagtgttattgaacaccagaatttattcctcctatctaactataattttgtatcttttaacaaatctctacctatctcctcctcctcctacttttctaagcctatggtggcctctgttctgccttttacttccataagatcaacttaattttagcttccatatatgagtgagagtatgtagtatttaaccatctgtttctggcttacttcacttaacataatgccctccagttccttccatgttgctgcaaatgacaggaatacttttttttttttttttttttttttttttttttgagatggagtcttgctctgtcacccaggctggagtgcaatggtgtgatctcggctccctgcaaccaccacctcctaagttcaagcgattctcctacctcagcctccccagtagctgggactgcaggtgtgggccactatgcccggctaatttttgtattttcagtagagacggagtttcaccatgttggccaggctggtctcaaactcctgacctcaggtgatccgccagccttggcctcccaaggtgctaagactacagccatgggccaccatgcccggctaatttttgtattttctgtagagacagggtttcactatgttggccaggctgtctcaagctcctaacctcaggtgatctacccaccttggcctcccaaagttctgggattacaggggtgagccactgcacctggccaggaatacattttttaattcctgaatacaattccattgtgcacatatacccccatctatttctaactttactcaaagctacctgtgtatatttatttatcttgtaagttgcttcagtgttaagtggacaaggaaacatttcttttcaagtgtgttagggaaaaaaagagaaaggaaggaagaaagaaatgaaagaaaaaggtgtgagtaacaatacactaattataactttcaaaattaaacttagacatctgaggaactggggcaggtggaaatgtatttgttaagtgcatatgtcttagtccatttgtgctgctatcacaaactacctgagacttggtaatttttttaaaacaggagttttattttctcattgtgctggatacttgggaaatccaggattaaggtgccagcagattcaatgtctggtgagggctgctgtctgcttccaaaatggtgccttcttgctgtgtccttacatggcagaggcagaggggctaaaggaacctagctagttccctggagccctttcataagggtgttaatcccattcatgagggcagaacccttagggcccaattatctcctaaaggactcactacttattaccatcacattggtcttaggtatcaacataagaaacacatacattcaaatcatagcagcatatctgtgacaagccttgaagtagttcctctgtcattcccattgagtcatccccataggtagtgtgacaaatccctacattaaaggtgaagaaactaagactcagaagttaagtgactcatccaagttccctgggctaataagttacagacctaagagcctaacctaggcctccctgattccaaagccatgctcttcaattttgttctttgaatctgcttattggttctgtcttttaaatgacaggtttgatcttaactctaggttggtacctagctaaatctctgtcttagggggattcatgtaaaccctggtacgatggaaacagaaaaacagcctggaagttgacataaggagaccatgtttaaacttgggcagattcctttactcattctgatcttctgattcctcatttgtcaaatggaaatcaaaatatacttgttccatagggttactgcaatgtttaaatgagataccaccatcctataacataacccaaaatccacccacttcaaaaataattcattgagtacttactatggacagtgaacattcatgggcactttatagtttttgtttgtttgctttttctgagaatagtttccatttcactactctatggtatgttttaggacagtgctgttgctaaaatcttttaaagccaagtcacattttatatgtatcaagaacctccttgcgttccccactcagtccctggcactaggaatacagaggtgcacgtgattgaaggcgtcctgcccttgtgagctaccagcacctttattttgccaatcactcatggatgtatgtggatggacttcttttttcagacttgtccctttctttttctgataacagaggccatgtttttttttaatttttaatttttgtgggtaggttaaactcatcattataatacaatacagttggataatgtggagggaatgtaagatgctgtcagagtcagagaaggggacttgagctagtcccaggggttggggaggcctcctggagggagcatatagaacactattttgttcatttcatttttccaaagtctaacaaagattcctgctgaatgtttcttgcatggagaaataagaccctttgctcaagcatatttattcattcacttattcagtcctcctttctctctgtgcttttccaggcctaagggtcccctgttctctcctcaggttcccctcttatggtgttcccatttccctcatccctgaatcatccacctgttcccactaaatgaagcataatgtttacagtgcatgacactgagaaagcactttcatcttccccctctagacattcctcttactcctctggacttctgacttctgaaccactgaaccaccagctctatgaactataacactgaacattgttcacttagagattggagcaactgcttcaagaactctgatatgaagcataatccgtccagtggcttggaataaaaattgtgtagacctgacattcctgggctaaaaccatatgggatatccttccttaaccagctattgctaagtattgttttgaatgaaactgctggaggatggtgattaagtttgcatgatgaatggtgggcatttttttttttaagtttgcagaagctgcctgtgatgtggtccatgtgatgctcaatggatcccgcagtaaaatctttgacaaaaacaggtacacatttattttgcatcctgtttgcaagtatcctgttgcaaatatcacagtgaatatttcatctctagaaagaatatgcttttcatgtttcaggtcagttctgaagattagggccaaaaaaggtaaaaattttgaattccgtggagagagttgtctcctgtcaatgtgtttgtctgatttctcctttgccaaaaattgtctaccaggttctaatggccactgcactgtatctagcccctgctcttaacttttgcaggcctggtgtaattttctcagctttctctcccgttaccctccaccctacccattgctcaccattgttcacaccgttcccccatatgacctgcctcccctgctcccctgctcccttctgtctaaatcttcaccatccatgaagacctgccttgaccctcctctcctccaggaaaattgtgtaccccaattcagtagtaaaactactaccgggaacatcgggaactgtgctgggctcttggccttcactatctttttgcagacattgtcaacaatgtactgtagtggttgaaagcaggtactggcggtcattacatatcatctgtgtgacctcaggcagggcagtcaacctctgtgagcccctgaatatgtaccaaagagttgatggtgatgggaagattaactgagacaacagatgaaaaatgctgagctctgtgcctgacaacagagaaagtgctcaatgagaatcagctattattctcatttgctgatccttgccactgaatctggccacacctgtgccttccttggctgatctccttctatatttacagtttttactatgttgattaccttttcggcctttgttctctaatttttgttctctaatcccacataaggctgactgaaaggaggaagcatatattaatttgccttataaactctaggtgccccaaattaatttttcttctctcctgttttaatatttaattctacaaggaagcatttgtcctttcgtcttctgatcccaatttttttgggtaaaagcattaacatttcagaattttatgatctaatattatggttcaagcacttgaaacaggagtgtcagttgtcagagactaacagggaagagtttaggaatgggattagggcaggcaaccatagtctttcaaagcattgcctctcaaacttcactgagcatgtgaatcacgtggggattgttcaactgcagatcatttcagcaggttatagtggttgaaattctacatttcttttttttttttttttttttttttttgagatggcgtctcgctctgttgcccaggctggagtgcagtgacacggtctccgctcactgcaagctcagcctcccaggttcacgccattctcctccctcagcctcctgaataactgggactacaggcacccaccaccacgcccagctaattttttgtatttttagtagagacggggtttcatagtgttagccaggatggtctcgatcccctggcatcatgatctgcctgcctcggcctcccaaattgctgggattacaggcatgagccaccatgcctggctgaaattctacatttctaatgagttcccaggtgatgttcattaggttggtctaaggaccactcttcaaatagcaaatatttaaagaatcaacattaatgcacaaattaagaattttattttgagaatcttgttaaccgagggtcatgctgaataagaaaaggttattgactgatttgcaatttgatgtgtcaactctaaaggataggtcctagccagtgcctttctgcctgctggttgttgaggggggtgtggatgctttcgtttggggttgatgtttggggttctttgtttcttctattttagcacttttgggagtgtggaagtccataatttgcaaccagagaaggttcagacactagaggcctgggtgatacatggtggaagagaagattccaggtatatcttactactttgtacccaagtgttattttatgaatcagtccacaaaagaatccacagtcacaagcacgcactgggaacaaattgactcaggaaatgaaactacatgaatgtgcatgaatcccaacagcctcttaactttatctccacaaaggatatttaactgcttgacacttcagctctcctgctgacccaggagctcttagaggatttacctctactttacctctttatccaagggccttgtccagggcgtgctacaaaaacaaagagactccaaaaatgtttgtgagatcttgtaattttaatactttcttctttcttccccagagacttatgccaggatcccaccataaaagagctggaatcgattataagcaaaaggaatattcaattttcctgcaagaatatctacaggtaattaatttcttcttgaagaaaaaaatgactgtcttgtcacctgtagaatttccttttttccttagcctcctctgagcttggagggctgtgtgaatctttcttgggccttgatgatgatcacagatggcaacctctggtgatctctgtccctccttccaagccgagtccagaaggtatccaagctagtggccttcacttggctgcctttcctcatccgtctctattgatcccaagtaggacttgcctctaaagctgacacaacctttgatggcatattttttcattcccagtgtgagtggcccagtccagggttcactggcctactaggtttcaggggagcaagggaatgttttgctaagccctttctcccaagttgtaaaatccttgtgacttgacatcattttgcaagtgaagcttccttagttggatctgagtacagatgcctaacacatgacaaggcgtcacacggcagtctaccaaaatctatattttttaaattaaaaaaaaaagtatttacaaaatttttctgataatttgtgtttattagaaaacagtttaaaattacagatagatatatattttttaaagtcacatataattctagtttcaaaactgagacccctcactcatttttaagcagttgtgaccaatggtgtaggtaggtactcattggtagaagcatctttggagatttttccacgtataatagcttggaacaagattgatgcagagaggaaaagctgttcaaaggaggtagaagctgagatgctagaatattgttcctgtttccatgtcactaccttctctcactaaccacatcagaaaagcagaaggatagattctggagactctactgatggcttttgtttcccaaatgacctgaattccccatgagtcaccttgcttctatctggaaacagccagaaaaggccatgagcattctacagcagttagacaggaaaacagaaagaatgaatgaaggagcaactgtaaaagcaatcttgcggcggaggagccaagatggccgaataggaacagctccggtctacagctcccagcgtgagcgacgcagaagacgggtgatttctgcatttccatctgaggtaccgggttcatctcactagggagtgccagacagtgggcgcaggccagtgtgtgtgcacaccgtgcgcgagccgaagcagggcgaggcattgcctcacctgggaagcgcaaggggtcagggagttccctttccgagtcaaagaaaggggtgacggacgcacctggaaaatcgggtcactcccacccgaatattgcgcttttcagaccggcttaagaaacggcgcaccgcgagactatatcccacacctggctcagagggtcctacgcccacggaatctcgctgattgctagcacagcagtctgagatcaaactgcaaggcggcaacgaggctgggggaggggcgcccgccattgcccaggcttgattaggtaaacaaagcagccaggaagctcgaactgggtggagcccaccacagctcaaggaggcctgcctgcctctgtaggctccacctctgggggcagggcacagacaaacaaaaagacagcagtaacctctgcagacttaagtgtccctgtctgacagctttgaagagagcagtggttctcccagcacgcagctggagatctgagaacgggcagactgcctcttcaagtgggtccctgacccctgacccccgagcagcctaactgggaggcaccccccagcaggggcacactgacacctcacatggcagagtattccaacagacctgcagctgagggtcctgtctgttagaaggaaaactaacaaccagaaaggacatctacaccgaaaacccatctgtacatcaccatcatcaaagaccaaaagtagataaaaccacaaagatggggaaaaaacagaacagaaaaactggaaactctaaaacgcagagcgcctctcctcctccaaaggaacgcagttcctcaccagcaacagaacaaagctggatggagaatgattttgacgagctgagagaagaaggcttcagacgatcaaattactctgagctacgggaggacattcaaaccaaaggcaaagaagttgaaaactttgaaaaaaatttagaagaatgtataactagaataaccaatacagagaagtgcttaaaggagctgatggagctgaaaaccaaggctcgagaactacatgaagaatgcagaagcctcaggagccgatgcgatcaactggaagaaagggtatcagcaatggaagatgaaatgaatgaaatgaagcgagaagggaagtttagagaaaaaagaataaaaagaaatgagcaaagcctccaagaaatatgggactatgtgaaaagaccaaatctacgtctgattggtgtacctgaaagtgatgtggagaatggaaccaagttggaaaacactctgcaggatattatccaggagaacttccccaatctagcaaggcaggccaacgttcagattcaggaaatacagagaacgccacaaagatactcctcgagaagagcaactccaagacacataattgtcagattcaccaaagttgaaatgaaggaaaaaatgttaagggcagccagagagaaaggtcaggttaccctcaaaggaaagcccatcagactaacagcggatctctcggcagaaaccctacaagccagaagagagtgggggccaatattcaacattcttaaagaaaagaattttcaacccaaaatttcatatccagccaaactaagcttcataagtgaaggagaaataaaatactttatagacaagcaaatgctgagagattttgtcaccaccaggcctgccctaaaagagctcctgaaggaagagctaaacatggaaaggaacaaccggtaccagccgctgcaaaatcatgccaaaatgtaaagaccatcgagactaggaagaaactgcatcaactaatgagcaaaatcaccagctaacatcataatgacaggatcaaattcacacataacaatattaactttaaatataaatggactaaattctgcaattaaaagacacagactggcaagttggataaagagtcaagacccatcagtgtgctgtattcaggaaacccatctcacgtgcagagacacacataggctcaaaataaaaggatggaggaagatctaccaagccaatggaaaacaaaaaaaggcaggggttgcaatcctagtctctgataaaacagactttaaaccaacaaagatcaaaagagacaaagaaggccattacataatggtaaagggatcaattcaacaagaggagctaactatcctaaatatttatgcacccaatacaggagcacccagattcataaagcaagtcctcagtgacctacaaagagacttagactcccacacattaataatgggagactttaacaccccactgtcaacattagacagatcaacgagacagaaagtcaacaaggatacccaggaattgaactcagctctgcaccaagcagacctaatagacatctacagaactctccaccccaaatcaacagaatatacatttttttcagcaccacaccacacctattccaaaattgaccacatagttggaagtaaagctctcctcagcaaatgtaaaagaacagaaattataacaaactatctctcagaccacagtgcaatcaaactagaactcaggattaagaatctcactcaaagccgctcaactacatggaaactgaacaacctgctcctgaatgactactgggtacataacgaaatgaaggcagaaataaagatgttctttgaaaccaacgagaacaaagacaccacataccagaatctctgggacgcattcaaagcagtgtgtagagggaaatttatagcactaaatgcctacaagagaaagcaggaaagatccaaaattgacaccctaacatcacaattaaaagaactagaaaagcaagagcaaacacattcaaaagctagcagaaggcaagaaataactaaaatcagagcagaactgaaggaaatagagacacaaaaaacccttcaaaaaatcaatgaatccaggagctggttttttgaaaggatcaacaaaattgatagaccgctagcaagactaataaagaaaaaaagagagatgaatcaaatagacacaataaaaaatgataaaggggatatcaccaccgatcccacagaaatacaaactaccatcagagaatactacaaacacctctacgcaaataaactagaaaatctagaagaaatggatacattcctcgacacatacactctcccaagactaaaccaggaagaagttgaatctctgaatagaccaataacaggctctgaaattgtggcaataatcaatagtttaccaaccaaaaagagtccaggaccagatggattcacagccgaattctaccagaggtacaaggaggaactggtaccattccttctgaaactattccaatcaatagaaaaagagggaatcctccctaactcattttatgaggccagcatcattctgataccaaagccgggcagagacacaaccaaaaaagagaattttagaccaatatccttgatgaacattgatgcaaaaatcctcaataaaatactggcaaaccgaatccagcagcacatcaaaaagcttatccaccatgatcaagtgggcttcatccctgggatgcaaggctggttcaatatacgcaaatcaataaatgtaatccagcatataaacagagccaaagacaaaaaccacatgattatctcaatagatgcagaaaaagcctttgacaaaattcaacaacgcttcatgctaaaaactctcaataaattaggtattgatgggacgtatttcaaaataataagagctatctatgacaaacccacagccaatatcatactgaatgggcaaaaactggaagcattccctttgaaaactggcacaagacagggatgccctctctcaccgctcctattcaacatagtgttggaagttctggccagggcaatcaggcaggagaaggaaataaagggtattcaattaggaaaagaggaagtcaaattgtccctgtttgcagacgacatgattgtttatctagaaaaccccatcgtctcagcccaaaatctccttaagctgataagcaacttcagcaaagtctcaggatacaaaatcaatgtacaaaaatcacaagcattcttatacaccaacaacagacaaacagagagccaaatcatgggtgaactcccattcacaattgcttcaaagagaataaaatacctaggaatccaacttacaagggatgtgaaggacctcttcaaggagaactacaaaccactgctcaaggaaataaaagaggacacaaacaaatggaagaactgctcatgggtaggaagaatcaatatcgtgaaaatggccatactgcccaaggtaatttacagattcaatgccatccccatcaagctaccaatgactttcttcacagaattggaaaaaactactttaaagttcatatggaaccaaaaaagagcccgcattgccaagtcaatcctaagccaaaagaacaaagctggaggcatcacactacctgacttcaaactatactacaaggctccagtaaccaaaacagcatggtactggtaccaaaacagagatatagatcaatggaacagaacagagccctcagaaataatgccgcatatctacaactatctgatctttgacaaacctgagaaaaacaagcaatggggaaaggattccctatttaataaatggtgctgggaaaactggctagccatatgtagaaagctgaaactggatcccttccttacaccttatacaaaaatcaattcaagatggattaaagatttaaacgttaaacctaaaaccataaaaaccctagaagaaaacctaggcattaccattcaggacataggcgtgggcaaggacttcatgtccaaaacaccaaaagcaatggcaacaaaagacaaaattgacaaatgggatctaattaaactaaagagcttctgcacagcaaaagaaactaccatcagagtgaacaggcaacctacaacatgggagaaaattttcgcaacctactcatctgacaaagggctaatatccagaatctacaatgaactcaaacaaatttacaagaaaaaaacaaacaaccccatcaaaaagtgggcgaaggacatgaacagacacttctcaaaagaagacatttatgcagccaaaaaacacatgaagaaatgctcatcatcactggccatcagagaaatgcaaatcaaaaccactatgagatatcatctcacaccagttagaatggcaatcattaaaaagtcaggaaacaacaggtgctggagaggatgcggagaaataggaacacttttacactgttggtgggactgtaaactagttcaaccattgtggaagtcagtgtggcgattcctcagggatctagaactagaaataccatttgacccagccatcccattactgggtatataaccaaatgagtataaatcatgctgctataaagacacatgcacacgtatgtttattgcggcactattcacaatagcaaagacttggaaccaacccaaatgtccaacaatgatagactggattaagaaaatgtggcacatatacaccatggaatactatgcagccataaaaaatgatgagttcatatcctttgtagggacatggatgaaattggaaaccatcattctcagtaaactatcgcaagaacaaaaaaccaaacaccgcatattctcactcataggtgggaattgaacaatgagatcacatggacacaggaaggggaatatcacactctggggactgtggtggggtcgggggaggggggagggatagcattgggagatatacctaatgctagatgacacattagtgggtgcagcgcaccagcatggcacatgtatacatatgtaactaacctgcacaatgtgcacatgtaccctaaaacttagagtataataaaaaaaataaaaaataaaaaacaactctcagaagcaaaaaaaaaaaaaaaaaaaaaaaaaaaagcaatcttgcagatatctgacgagtctaagctgttcaaagatatgttgcatggagaaaatagaatagtagaaacctagacaaagactgggaaataaagatggtcttatccccaatactcttttaccttttttgtcttatgaaacattaacctttttctcataaatgaccagaagacctttatattataattcgtcaactcccctcatttgtgtctgctttaggctccaagtgagctcactcattctccatctggaaagaaaatatgggcatggcttccatttggacttgtacagacagtggcccataatgggaaccaggtgacacatcacaagggcaggttctgacacctcttccttccagaagcccaggggtgctggcagctgcttctgaggatctctctcttccttggctcatatttagcaaaatcaaatttaaagaaccccattcctcgctatccaccatccccctattcatgtgccagccactcctattggatcctgttgctttagctaatttttatgaaaataatagtcattcacctgttaggtacttatctaaggtttgtttcaaagcaagtttggtccccttgctgagggtctccagctttttcccagactctgcctctgaccctggattcaacattccctcaggaagcttcggaagagaggaaagcaaattagccacagaagctgtgggggtccgtggccttggttgctgctcctgctgtttttttgaccagcaggtggcatggatagctcccctcccgacatgtcactgcaggagaggagtttatatggatgctaagtggtctgtgcaccttgtcgtcgctaaaaaaggggcttcctccattagcgaattggacgacagatgtatcctacggtctcttgatttccttttttgctttcttgtcatagacctgacaagtttcttcagtgtgtgaaaaatcctgaggattcatcttgcacatctgagatctgagccagtcgctgtggttgttttagctccttgactccttgtggtttatgtcatcatacatgactcagcatacctgctggtgcagagctgaagattttggagggtcctccacaataaggtcaatgccagagacggaagcctttttccccaaagtcttaaaataacttatatcatcagcatacctttattgtgatctatcaatagtcaagaaaaattattgtataagattagaatgaaaattgtatgttaagttacttcactttaattctcatgtgatccttttatgttatttatatattggtaacatcctttctattgaaaaatcaccacaccaaacctctcttattagaacaggcaagtgaagaaaagtgaatgctcaagtttttcagaaagcattacatttccaaatgaatgaccttgttgcatgatgtatttttgtacccttcctacagatagtcaaaccataaacttcatggtcatgggtcatgttggtgaaaattattctgtaggatataagctacccacgtacttggtgctttaccccaacccttccaacagtgctgtgaggttggtattatttcattttttagatgagaaaatgggagctcagagaggttatatatttaagttggtgcaaaagtaattgcaagttttgccaccgaaaggaatggcaaaaccacaattatttttgaaccaacctaataatttaccgtaagtcctacatttagtatcaagctagagactgaatttgaactcaactctgtccaactccaaaattcatgtgctttttccttctaggcctttcataccaaactaatagtagtttatattctcttccaacaaatgcatattggattaaattgactagaatggaatctggaatatagttcttctggatggctccaaaacacatgtttttcttcccccgtcttcctcctcctcttcatgctcagtgttttatatatgtagtatacagttaaaatatacttgttgctggtactggcagcttatattttctctcttttttcatggattaaccttgcttgagggctttaacaattgtattactttttcaaagaactaagctttagcttcattgatttttttctatttaattgggttttgctcttctctttagcattggaaacatagaaatgctttctgatttctttgggtagatttacgtattcagcttcttgagatggaagtttagatcactgatccttcagcttgttttcttttttgtatacatagattttaggacgatatattttcccttgagttctgctttagctgcagctcttatgttttgatatgcctctctttattatccttcagttaaaaatatctttcaattcattgttatataaaaatatgtgcctagtttttaacatctggagattttctagttttgaaaaaaacataagccaggcatggtggctcacacctgtatccccagcactttgggaggccgagacgggaggatcgcctgagctcaggagtttttacaccagcctgggaataacagtgagacattatctccaaaaaaattacctgggtatggtgttgtgcacctgtagtcccagctactctggagactgaggtgggaggattgtttgagcttgggaggttgaggctgcagggagctgtgatcacaccactgcactctggcctgagtgacagattgagaccctgtctcaataaaagcaaaaataaagaaaataaaccatatgtgttgaacaaaggattaataaattaatttgagactccttcagggaatgaccacaatttattgaaaatagcctaaatgttggagtcaggcatttctggattcatattttgacatcatgctgtcatcttgaacaaaatgcctaacctttctgaacttcaacttccttgccactcaaataaggattacaaaacttaaaatgtggtaagtactaaagacgacagcaaaaattgagtccagcacagagcttcctaaataagcaagcactcaacagagttggttcctttcttcctcccctgcttgacaatccagtttcccacaggagcctttgtagctgtagccaccatggtcagtccagggattcttcactagccccttctcccctggcagacatccttgtgggagtttagtcttggctcgacatgaggatgggggtttgggaccagttctgagtgagaatcagacttgccccaagttgccattagctccccctgcagaatgtcttcagaatcggggcccggtcagtctcctgggtgacctgctgttttcctcttaagatcctttccactttggttgctgctttcgggactcatcgagtccttgctcaacaggataccccttgaagtggctgcctgggccacatccccttccaaacaagaaatcaaaatattagaaatcaatttttgaaatttcccctaggaagactcatttgagtgttcaagttcagagccagtggagaccttaggggagggtggtcacaaggattttgcacagtgctttagagggtcccagggagccacagaggtggtgaggggctgggtgctcttttctccgtgcatgaccttgtgtgtctatcttcattaccacaatgcctcatctctacctcctttccccctgtagttccaacgtgggtatctttgccatctctggcccgaaggactttctgacctacatgtataaataccccctcacaatatatattacttttcctataagtgacttctctactggattactggttgctcatacacctcatattttactcgtaaatctactactccctgtctgcctactccattctcatttgctgtagaaaattctcttaccatcccaactttcacccaccatcatgcttacccaaaggctgtgggaatgacctgggccctaatgccccttttctaaattcctaaggctcaccattttcctattgtaatggttcttgaccttataatgtttgaggcaccttttcaaatatagtcctttgatttcagactgaatacttgaaaggacacacacacacatacgtaagtgcatatgactgcatacacccacacacacacacgtgcctgtatacagtcatatgatacatacacaaacacacgcacacaagcctgcatacatcatatgccaacagtggggatatgttctgagaaatgcatcattagatgattttgtcattgtgtgaacatcatagagtgtacttacactaacctagatggtctaacctactacacacccaggctacatggtatcacctattcctcctaggctacaagcctgtacagcgtgtgtctgtactaaatgctgtgggcaattttaacctgatggtaaatgtttgtgtatctaaacatatctaaacatagaaaaggtacagtaaacatgcagtattataatcttatgagaccgtcatcatatatgtggtccactgtttgggccatcattggctgaaaagtggttatgcgacacatgactgtatatatactttcctgttacaacaacagtgtctctcaatccacagtaattgcagcatccagtaggtcttactttagccctgagtcaccatttgtgtcaacgtgtttagtgccatgtccacgtctctcatgtaactggcagagctatcaaatattttggcaaaacacattgtttctttggctttgccttggtaactttctgtgccttttgtagctcttgtttggaagaagctcaacccatgtctgcacactgtgatacaagggggacagcatcgacatcgacttacttcttggtgccttattcctccttagaacaattcctaaatctgtaacttaagtttctcaggaagattccatactgcacagaaaactgcttttgtgggtttttaaaaggcaagttgttatatgtgctggatagtttttaagtatgacataaaaattgtataaagtaaaatattaaaatacacctagaatactgtataactttaagtcattttatcaacacattgctaatccagatattttcccgcagtttttctttgaataacagagcaattaatttacttttactatgaagagtcatcattttagtatgtattttaagcaatccaccaagaactcagtaggcagctgagaggtgctgcccagagaagtggtgattagcttggccttagctcacccacacaaagcacaacaggctttgaactattccctaacggggcatttattcttttttttttttttttttgggagacggagtctcgctgtcgcccaggctagagtgcagtggcgcgatctcggctcactgcaggctccaccccctggggttcacgccattctcctgcctcagcctcccaagtagctgggactgcaggcgcccgccatctcgcccggctaattttttgtatttttagtagagacggggtttcaccgtgttagccaggatagggcatttattcttgaacttgattcagagaggcacacattaccattctctaatcagaatgcaagtagcgcaaggcggtggaaactatggaattcggaggcaggtgatgcattgggcgagtttattaacatctgtgactctctagtttgaaatttatttgtaacagacaaaaatgaattaaacaaacaataaaagtataataaagaa

SEQ ID NO: 61 - DNA, 33032 bp, Homo sapiens
tcctcttgccacgaggtcagacggcgagttcttagagaaaaaggctgcttagctgctgcttatcatgtaacctcaaaaggaaactgatcgtctttctcatgctgtcacgtacttgggttattatcgctgattacagctggaaacaattgatttgctcttacgtatttgtgtgacttgactcttcaaacacaaaggtatatttttattatctgatattttattaaaatatcttaaatggtaagattttttttttctttttctttcctattcccatagtcagattcttaactttggagtcactctcctatgtttgagtagccatacttgctttggggcaaaatattgggggatagttttttggagaaagaaaatctgggatgtttttgtagtttagtaatagcaagaatcatgtctgtttgctttaaaggcccaggaaggactgagatactaatggaggagatcgatagaatgggtgatgaagtatcataaatctaatgtaacactatcttctgtcagtgacctagaactatgatatcccgaggcagaagtctcccaggagatttgatgtgtgggtttagaggagtactttcccaccaaccgtaggcatgaaactatatgggaaaatatatcagagtaaattgaaatactttatagcatgccctcattcattcttacagctgtaaaattaaaatgtatgaatggccattttatgaatgaggaaaacctgaaatttgatgatttggctggacccccagattcatgataatctgtatatgttaaggggttttgtttgaataaaagcacatttctaaatagaatggattagagattctcttcattgggattagtgaattcgctgcagtggctgaaggtgctgtcccaaagaggatgacagttacgtaaattttaagcatttggtaatatatatttcctctatttaaatctgacatctaaagaaatatctggctgggtggaatatttttttgcttctgttagacagtaggttgtttagacaataaaaggagagaaaagtttatcctagtctcattcaccaccccgcataatccctgatggagcagggcatcagccacacagatcatctaaacaggcagataaccctgcctgtttatttatttggcctcagaatacggtgtatggtccaccacccctctccaccgtctttctaacatcatcctgctgaggccaaagacacagttgggcagggtacaggcgtggagcactgcggtggcagagtcagtctgagaggagttagcacatgacatcagtgcacagtgcagatgacggaaacatttggcagcatcctctccagtgtggaggtgatgaccgaggtcagcataatccagctgttcagatacagacttttcctcactgaggaagaggaggcaaacccttctctttcttgtcctgtaacagacaagacaagaaagctctcagagagcaaaacaaaccctttcagaagctacagagccatggaaagcattactgaggggaaagattttctaattgttctgagaccaataatgaattgctcctgaaaacaccattttcttttggctcatagctgacactgatctggaggcctcttgatttttttctcccaggttaacaggaagatctcgagggccctggctgaacttcaccttttggctttcttggcctgatgctgaactctcgagggtgagaagggctgatatttctaaacaagtagcatccaggtgttacctagcttctggctgatgtcaaaaagggcagtgggatttttctaagatttttctcttaaattagacatttttttgaagttgctacaaaattactatgaattttatttataggcattttactgtgatttcatgagaactaagattttttgtgtgtgtgtgtgtgtgtgtggtttagtagtatttttttaaaccaatttgttgaatttctgctattttccatagcaagaggacatatgaatacatctaagaggggaattcagctctctgcttactgacagtttcagggttatgtaatctttaacaggcttggagagcatcatgccccctctcagttttggtgaagaggctccttaaaactagcatatgtggtttctgattaaagcactttctgttcctttaatttgggattgtctgtgaagtaaaataccttcctttcaaccgtagggaatgaaaatatttactgccgctgatggagttagtggattgggaattaacacttattaaacacttgttttgggagcttaccagcaagatctcatttagccctacagcattttttaggtagctgtaattagctttattttatttatttatttttgtaacttcaacttttattttagattcagggggtgcatgtataggtttgttacctgggtgtattgcgtgatgttgaggtttggggtacaactgatcccatcacccaggtactgatcatagttatttttcagcccttgctttcctccctctctcccccatctagcagtcctcagtgtctttgttgccatctttatgtccttgagtatccaatgtttagctcccacttaaaaatgagaacatgtggtatttggttttctgttcctgtgttaattcacttgggataatggcctccagctgcatccatgttgctgcaaaggacatgattctattcttttttatggctgtgtagatttccacagtgtatacgtaccacatttcctttatctagtccactgttgatgggcatctaggttgattccatgtctttgctattgtaagtaagtgctgcagtgaacatacaggtgcatgtgtctttttgatagaatgggaaatataaccacgacaaatggtgaattctgtcatggttatattaaacaataatcacaatgctacattctctatacatgataccaaatatctgaattaaacttatcaaaatactgttaattacctagatgttatatctataaaatgccaacctccagatatttggagacattaaaaatgattttttcactgtttgttcagatatttagcaacatgcaggcacttttaatattggtagaagacttttggatatgttttagcattgagtagtttatgtgcatccccattcctctgattgtttcagtcaagtttgctagacagcctagtactgtgaatctgtagagggtctaatactgtaaatcatgcgttcttagagagggtgatattatctccaagagggcaaaaataggttcttcagggaaaaatcttagctattacaatagtttgtggcccccaaagggccatagtacataatagatatacagtatatctgtgatattaaactttcatcaggggatgattaggaaaaagatgtctaaaaagaccctgtagtggggtctaatactgaaagaaaggttgagacatgtcattgtaaatgctctggatgtacttattcaactgaggtcaaaagatttttctgtggtttgttgtctttttgtgtcttgctttgtgtctacatcctcatttttcatggattttaaaagtactggtttccagagggggaacaacgtttttagtttcttttcttttctcttttctcctcctcctcctttttctccttctccttcttctcctccttctcctctttttctttttcctctctctctcctttctttttttttgatacagaatctccctctgtcgcccatggttggagtgcagtagccccttcttggctcactgcaaactccgccttccgagtttaagtgattctcatgcctcaacctcctgagtagctgggactacaggcacatgccaccacgcccaactaatttttgtatttttagtagagtggagtttcaccatgtttgccaggctagtcttgaactcctgacctcaagtgatccatctgcctcagcctcccaaagttttgctttttttttgagacagagttttgctctcccacccaagctggagtgcagtggcatggtggcatgatcatagctcactgtgtcctctaccttctgggctcaagtgatcctcctgccttagcctcatcagtagctgggactactacaggtgcatgccagcatgccaagcttctttgttcttttttgtttctttctttcttttttattttttattgtagagatggggcttgctatgttacccagactggtctcaaactcctggcctcaagggatcttcccaccttggaccccaaagtgctgggatacaggtgtgagccaccatgcctggcttcatatttatttcaggaaagctttattgattatatccttaaatactttaaatatatatttttaaattgtgataaaagatacataaaagttgccatcttatccatttttaagtgtacagttcagtgccactaagtacttttcatattacaacttttgccaccacccatttctagaactttttcatcttccctttgactgaaactgcatatccattaaacaataattctacatttctccctcccccaagtccctggcaaccacccctctactttttgtctctatgaatttgatgactctacataccttatgtaagtggaatcatataatacctatcttcttatgactggtttatttcatgtagcgtaatattttcaaggttcattcatgttgtataaatgtcagaatttccttcctttttaaggccgaataatattccagcgtgtgtgtaggtgtgcataccacactttgtttatccattcatctgtccatggacacttggattgtttcttttggctatcatgaataatgctgctgtgaacatgggtgtacaagtatctgtttaaatccttgctttctttacttttggggatatatcaagtcattctatgtttaattgttttaggaactgccatactattctacacagtggatgcaccatgatgaatttgtttttaattcattttgtgcagtatttggcacagtgcagtgaataagtgcgtacaccatgaatatgtgatagaaaatgacacgaagttctgagtaaatctgcgcagtgattcggcaccactattaaaacactgtctcctatttattcacccttgcatgtccacatactacagtgcacacacttatgaagatgtgcatggttgagaataactcctatgagaatcattgaggtaatgcacttagattccatgtgggtcagatctttttggaaatttggaccgctggcaatgcagttccacatcttaaacctagggaggcttgctggaggtttaaaagggccagagctacaaaggtgatccatagatgtggggattaggtcttgtgaatgaagatgaactgaggacactttgaagataggaattgtgtgagttctgatttttacccttctcctccccttccacacccattccctcacctctgtagcatagcacagggtgacttcataaattttggttgaacaaataacccagggtggaaaaaaaatgaaatgatgatttattttttaatcataacagctgtgaaaagttgttctgaaggccataagaactttctatgttgtatctttgctatgggaaaaggaggtgcgtttaatttgaggtggaagataagagtttggaaactgaaagtgatcactgggcaaggctgccaaatttacccttggcatttctagtgtcttgagagatgagctgtctgaaagatggcagaggctgatatatcatggaccttcccaaccctgctcttctgtggtaaggtttcgtatcttgtaaacagccaatgaaaacagttctgtgtgtttacctctagtattgaacagtatccagcatttagataagaaagggattgttaaacccaacagtaatgtcaaaatctagggcagagtgacagattgcagccaaattgaagcaggcaggaggtggactgggtggtgataataatgttaaaggacatgctttctccaccccatacctcacttaggtttgttggctctccaaacttcatggttgttcatttttgggagcctctcttaaaatgcaaataacctttaagaagggttactgttgatgccttggtgggaattaatttttagattctttcttgaaattttactggataagtagggcacagagactgccccaatcagagtgcagataaggggtgaggtagagtggcaggagcagtgcagggaacagaatgtgaaggttaaaatcagacttggtacctccccaactctccttcagctggctttcttgtttctgttctttgtgccaccactattatcctcaaggccttggagttacctctgaccctcatctctcttttccctgccctgccctgcccttcccttacctccttctctctctctctccttctctttccttccttccttcctttcccttttcctttccctttcgctttcctttcctgtctcactctgttacccaggctggagtgcagtggctctatcttggctcactacaatctctgcctccggggttcaagcaattctcctgcctcagcctccagagtagctgggactacaggcacccgccaccacgcccggctaatttttgtatttttagaagagatggggtttcactgtgttggccaggctggcctcgaactcctgacctcaggtgatccacccgcctcagcctcccaaagtgctgggatcacaggcgtgagccaccacacccggcccctcccctgtctttctgtgttcagtctcttgcctatagattaaatgtgtgaaatctctaaacagttcccctctttccatgcccaggagcaccacttcagttcagacctccatgacctgtcacattgactgttgcagagtctttcctgatcacttccacacagctgccactgtgatcgtgtttttatcttgttcgaaacccctgaatggctccccatcacatctgctgtccattgtttgcaggcagcatcagggccctgaagggttccagacttgactctgtggtcctcctcttctcctatgttctcttcaagttgggccgatggtccaaagaggccaaaatgcttaacaatgaagtattaattagaactttgaaaaatgagtaataattataactaccatcattgagtgtatattatgtgccaggagttgtgctaggcatctcatgacactaccacgtttaacctacctactagctgaatgcagttaatatacccattttatggatgagaaaagagtcttagagaaattaattaaagctggatggttattaagtgaatggagcttggatttgaacccaggtttgtttaacttcagaaccccatgcttttaatcaagggaagaagaatattacaggcaagaattctagcttgggtaaaaatttggaggcaagaattagtgtgctattttagaagatattcataaggactgcatgctgaagaatagagatagaagtatgatgggataatgttttagtttgctagggctgccgtaacacaataccacaggctgcgtggcttaaacaacggaaatctgtttctcactgttctgggagattggaagttcaagataaggtgttggcaggtttggtttctccgaggcctctctcctgacttgtacatggccgccttctcactacgtcctcacatgtggcgttttctctgtgcatgggcatccctggtgtctctaccctcttataaagataccagtcagattagatgaggactcaccccgacagcccatttttaacttacactctttaaaggccccatctccaaacatagccacattctgcggtactgggggttaggacttcaacatgtgaattttggggggacaccattcagtccataacagataggtttgatgtagcttgattttagaggatgtgaaaaccaggcacagacatttagctttgatatggaaggtcataaggtccaattgtggttcagcaggggaaaacatgaatatcattgcttcctcaagcaaacttctagctactcttaaacataaaggtagttagaattagtagagtactaaggggtgaatggggaccatttcggagagggaactattaacacttttctatagtggaatgaaagagtagaaacagtcaaatctttaattcctctagaggtttctggaaaaatgaagataatcctttggtgagggtagagggacagagtggggaatatggcaagtttcattttagacttgattatactcttggcaacatggaattagaactcagagaaaaggtcagagctagtaataggaatcaactctagacaggtcagaactgaacctgtggaagtgggtaagattgctcagacttcaaaaaggacaagagacaagaattctcacatctgaaactgctttgttgtcacactggtttggaggatagtagggaggctctccgggaactctctacgtaaaataacacctctggctttcttccttgaccttgctttgcttttcttagcacatcatggccacctggcattatcttatatagctttttgattattgtctgtctttcccagtagaatgtaagctctgtaagggcatcgatggcctttctgttcagtactgtattcgcagtatctggaagcgtgtccggaacattgtaggtggtcaataaatatttactgagtgaatccatgaataggtgaatttctataatcaatataatttaatttgataattagattgctggatatttcccttttatcttttcttaaagtaaaaatttgttctttaacaaatgtcttttaataaatgaacgtacagacacatatgtttgagaatctctaaatatccaacctaaaaacttgggtttgtttctgtgttttcccttaacttgtactttccccaaaccaagatcacctggtctcttctctgctacatcatttctttatgacaaagtagttatgactctctttaaaaagccaggcatttcagcactctggttactttgatcagattatctattcgtatctacttttatattttttgtaactttcataggttatttgtggagtccttggtttctgtgaggtctcttttccctgtatttaaagattcccatctcattgtaccgatgtgggtgccagatcatatgaacataagaaatctgtttacaccattctccattcttttctctgggagtactgccaattatgggatggtgtgatgaagtcataaaatacaaccttaggtaggataggcatttaaaccaagtccactctctttcctttttctaagggatcataatcaaaggtaaatgtgaatctacttgtattttatacaggtgaagactcagtaaatctagcttttctttctcactagtctgagtggtatacctggcactagaattattgtgttaagtcatttaaagcagtgactcttcagcagatggggaattcctccttaaaggactattaaaaaatcattgaggaagtgttttcaagggccacacatcccctttttgaaaatcatagtgggtgattgagccacagcacttagcttgagcaacagagtgagatcctgtctcaaaaaaaaaaaaaaaaagaaaagaaaaaagaaaaaaaaagaaaaatcatacaggccacagagcacctttctgatggggcatgccatacctgtcaggtggaaaacacagggttgagaatcacagaagaaagaatctgagagttaaactgaacagagaacatgtaaaacgaaagggtgtctttgttggtttccatcctctcctctttactgccgaattaacttttggtcccccagaccccttgtttactagaattttatggacgtttaacactgtatggaatgatgtaggctgatgggaagaggacactctgcagggcaacaggacaagtctataaaatccagaatcagattaggagatgaaattctgagcatgattgttggaaaacagagaaaaagagaaggacatcgacaagagaacctgtttactgaacctatggccagtttagtacatctttaagaactgttcactgtaatagttgtctgacttacaaattctacagttatgatatttttataattatgctcttttgtaatcagtttgattgcatacgtgtgaaagtgctctgggagaaaaattcaatatagatgcaaggtatgactaacagcttttgtccaacctgtaatctatcattttccactccctgtagccatatgcacacaaataagagggagatttactcaatggtcataataatttatgggaacaggaatggaactaacacttattaagcatctaggatgtgtcaagtacttgacatacattgtacattatctcatgccatattagaaatttgatttagatactagtatctcaatttataggcaagtaaactgaggctcagagattaagagatttgcccaaggtcacgtagctggtaaatgctacagataggtatgcaggcttcaaagccatgacactgcagtgcctctaagcacttttgcttaaagcaagggttggcagactttttctgtaatgggccaaatagtaaaaattttaggttttgtgggccaagagacaagatggaggatattatgcaggcacttatataaacatttaaaatgtaatcattttaaaatgtaaaaaccatttttaggtgacagctgtgcaataggttggatttggcctgcaggccgtagttgccaactcctggcctaaagtatccagaaaatgtaagcaaaagcaattttggggaggtaaggtgattgtttgaataaataattgtcatcaactttgtattaaatttgcatagtcttttagtaactgagaattcagttttcctcactaattccagtattaaattatcccttcataaaattcttcctgttgatagctatgcatgtttgatgtattttgtctgttagtatgcattgtgtttggcaagatttcataactgcatattttacctcgctctttgaccattctcccagctgttacatacattagagataatgtgtgtatataaagtacatagtattccgcatatggcagatattaaatagtggtagctattataaacattatcagtgttccaaagtattattatattatggatctataatttattattttgttggtattaatatatgttacatatgatataagctgatttctcctcagatcttaaatatttttataactagtctttctgtgtggcacacactactgtccttgtttacagaaattcaatataaatccctagagacttataaaaacaaacaaaaatttcttaaaatcccccaaaacaaaaaaacctcaagttttaaattctgaattaaaagttccagaattaaaattcttcttgaaaaaatgtggcatataaggcattcatgcctttaaataagacataaaattatattcttatccctcattcagtttgacaaatatgtgttacctgtattaaaaagggaagggggaagaagattttggatatgaaagttttgcaaaacataaattctaatcaacatgtttatgaagcaactatgtactgaacatttacaagtactgtacttcatttctagattagtgagctcaatttaagctcaatttaactcaccttccaaatttagccttttctttgggggaaaagaggtttaagtcaaaatataaaggaaaagtataatggttagaagtttcttagctttaggcctttgcagatccatgtaggccaaacctcatacaaaggaatggtgaagggtctttcgtcaaaaattttcttaatttctgtggatcctaaaattcaactataaaatattcagttctttggggttaattgccttcaaaattttttttctccttaaaaagtaaatattaccaggaaaagtaacagttatcatttatttgtagtacaatgtaaattagcttattagttttcttcctgaaaactgagatcctttcccagagcatgtacattttttacagtagaagggtacagggatgggtaattttgaactatgtattactgtctagaatctgcggatttgtgtaggaaagagtgtcacaaagaagaatggagaggaaaaaaggagggagaaaggggagttgggattagaagatactttttggtccttcaccattctgttttaaggcagttcagattttagtgtcctttaaagcaggcaagagttgacagtattcccacattcagtgtttaggaggatgctttcattcatatgtgtggaaatgaaacttttggagttgtcaacaagtcagagaaagcagaagaagccatggaacttgtaatgctctctgcctttttggacaaagctcacctacttcatttttacctcttggtgtctatagtgggtaaagttcatcattataaatagaaaccagaaaacactctcatgagctaagaaccatttacagggtgaaagttaggaaagtgcacttgtttcatgtggatgttttgtgtgagttttgattattactattagaaagtgtggtacacaggtagcccttcagactaacaccaaacatcactccttcatatatatgattttgtatgaaccatatgcattttatagtatgtggatattttctgaaatcaaatggaagaacttttcatttctttagaaatgaaatgttaaaggggaagaaaaatttgttttgttttcagtttaaacacttggatttctgctgggctagaaagatgggatgctgcaaaggtatttcagggtactgtagcattgctgtgattcagggtctgtttataaggcatctgtttattgggatgttcaactgtgtgacctgactttgtgcaaggtgcctctctggctgcccatcaggggacagaccttgtgtacctgctggaaagcagtggagttactttacatagtggacgactcactcacacctagtgggtgctcagaaaatatttgtgaagaggacaaagtggtatatggcatctcctttgatgctttcatataaaaggaagttgcagagagatgactccggggacactattaattttgtcttcacacaatcagtccataatatgcaaagttgtacatactatacatacagtacttaacggggtatcaagtttattctcttagcactgagcaggatgttctgagatgtgcaaaccttttgctaattcatctgtatgatgattaggttactggttggagaaatttcctcaatatggtatactgtgctttgatatcaggtgctaataatttgctgcaaacaggacctagagaattacttttaaagacaaccttttgatctttccagattaaaacatacaaaagaataggttacactcttgtaaggaaaaagcttacagaacttactaactacagctgtctgtgccatagcctggttggtcaggtggcctattgggaagtatataagtgccagtagaactgagttcatatgtctcagaagtagtaattgtttctattacatggataccatatggaccagaatgttcatacagccaggtataagctccacaaagacagagattagtgtttgtctgaggtaccgctgtgccccagtacttagaaaagtacctgacatttataaagcactaccatattgaagaataactagaatttgaaaatatgtggtctgatttactcatctgcattagaaaaatctgttagaataccctgaagtttaaatgtttcttgagatgttgaagtatgttttacattgctatggggataataaattattatttttaaggaaaagcattcaacaaatcaacatataagatgatatctgttttgaaagctcctgaaagattttatgttctttacaaagaattctgggcaaaaggcagctgggtttttatatttacaagatagatgaaaatagttttataataatccaagtgcagagaatgaggagattctaattcaaggggccaaagtatttgttttgatgtctgtacggtattgacataaaataattttggaagcatttccacttgtttctaccatccagttaaatatgtaccaagtaactacctactaagtaacaggtacttggctattgacaagggatacatgtcttgggagcttatagtggaatagaggagacagactcataaatggttaattttagcacatcctaagagctatgatagaagtctgtgtggggactgagaggaaaggcccttagtccagaagtggggttgagagttggggtcaggggaggaagggagggtcaggaaaggctccagaagtgttggatattaagtgagtcttgagtgagtgttgggtattaagtgagcatgagattttggttgaggaagaggagagaagaacagcaagagcaaagtctcagagctgtgggaaactatactcagtttcgtgttactgaaggtaatgaggaagatgaagcttgtgaggaaggcaggacttggacatctgtcattctaagaagactggactccatgctaaaagcagtagagagccactgaaggatttttaaatagtgtagagcaagcttgtccaacctgtggcccatgggctgcatgtggcccaggatggctttgaatgtggcccaacacaaattcataaactctcttaaaacattatgagattcttttgtgatgttttttctttttcttttttcattttcttttcttttcttttttttttttttttagctcttcagctgccattagtgttagtgtattttatgtgtggcccaagacaattcttcttccagtgtggcccagggaagccaaaagattgaacacccctggtgtggaggaattcttagaagaattcctggcattccagcattccattggtatgccgatggcagtctggaggatgggttttaagtgggcaaggctggatgggtgatcatttgcatcaagtaagagataaaggcctgtcttggatagtggaaattagagatggagaagagaggagggtttcagaaccaggtgttcaacaattatgagtccaatctggaacttttgagttgactgataggacattgcctacattcgatccctaaaaattatttaaatctgtacttactaatttatttttaaaaactgtattttctaaaaaaaaaaaaaaaaaaaaaaaaaaaacttcatgcaaacagtattgtttcacatctttgcaaatttcttaacatccggttttacagaagacagattttcatatttgcttctgcatttaatttgttgcagttgaccaggtgcaggggtttacgcctgtaatcctagtgacttgggaggctgaggtgggaggatcacttgaagccaggagttccagacaagcctaggcaacacagccagaccccatctctacaaaacatgaaaaataaaaaaaattagccaggcctggtggggcatgcctgtagtcctagctactggggagactgaggtgggaggagagactgagcccaggagttagaggttacaatgagctataatcatgccattgcactccagcctgagtgacagagtgaaaccctgtctcttaaaaaagaaacatgtgtcacaatatcttatgttggtgaaagtataaagaaaatctggtctcatacacaaatgtagttggtaaaggaagaaatagcttaatagtcttttcaggtaatttggatattctaatttaatattataccaaaacaagtggtagttccttaaaggagagatgcaagatggaacctgaaaccatatcaatgaactttttatcttctgatgcattaaaatccattggccacatcttctgatacattaaaatccattggccactttgaatggctctttcacccatgtgtgattttataatgtcttgcattgttcatttggaaattattagttaattgagttatgcaaattttctaaatgttgccacatttcattatataatataaaaaaatcacatttgttaatagcgcatcatcactgggctcatcaaaaaagtcttctagaactaggaagctatcaagctcaaggtgtccaacagaagtttcccaaaattgtaatttttattgaaaaacttgaattttattattggcaacaaatactgttattttccttaacatgacaggctcactttgttcattaaaacacaaaaccaaaccaaaccaaaaactgacaaatacctgagtctgaaacagtttgtcagtcaagtataattggtgttccatgaaaaacagagggcagttcagctcacaactcaaacagtatttgattagaacaaatggcaatgacatactgttcaagctaatagacaagtgcatttccttgagacaattgtcatatttcaggatgcagcacaaacttctatgcatatttcccatcttgccacataaaatattaaaatgatgtatacaagagtcaattaatattgttactgcttcatccaggactttttaggtgaaactggcttttattctttttctttctgcaagtagacagtggtgaagaatacaatgattactagttcattttgttgctgctgccttgatttgttttaaggcaccattagttatacccattgcttttgtaccatcatttcaaatgtaaacacaattgtttcaggataaatgatgagattcgaaaagttattgtacattttgaatgtttcagcattccttgtgtttgttgtcatgcattaaaataaaacacctttgatgactggccggtgctggaaatgaatataaccgaaatagcaagtccagacagtccatagatctatccatttctaaggcaaaagtgcaattttgcagacaaaaccagtttgcagttaagtctttaattcagtgagctgctgcattgttgcaaagtggcagtgctgtgatttcttttgctgacttttcatctagaaaatattcagcaaaataaactctaccaggctttattggtctttcacctatgatgttcatttcttcagccaaagcagtacaataacttatcctgtaagatactggctttttcatctcaagtttgaaaagctgttccaaattgtctttggcttttcaaaagttcattacatctacacttaaaaatccaattctggccgggcacggtggctcacgcctgtaatctcagcactttgggaggctgaggagtgggggatcatgagatcaggagattgagaccatcctggctgacacggtgaaaccccgtctctattaaaaatacaaaaaattagccgggcgtggtggcgggcacctgtagtcccagctactcgggaggctaaggcaggagaatggcgtgaacccgggaggcggagcttgtggtgatccaagatcgtgccactgcagtccagcctgggtgacagagcgagactctgtctcaaaaaaagaaaaaaaaaatccaattcctttttttttttttttttgagacaaggtcttgctctgtcacccaggctggagtgcagttgtatgatcatagcctactgcagccttgacttcttgggctcaagtgatcctcccacttcggcctcccaagtagctgggaccacaggcatgtgccaccatgcccagctaatttttaaattttttattttatgtagagatggggtctcattatattgcccagactggtcttgaacttctgggctcaagcaatacttcctgccatggcctcccaaattgctgggattacaggcgtgagccactgcacccagcccagccctcaattccttttttgaaactctggattattggtctcaagatagtgttacaatgttaattgacaccataaaactaaaaaatgttctattgcataagatacaataaggtaaattattaacatttataaagcctggggaaagatagcgttctcatatttttatttcttctttacagtttcttccagtagctttggattagatttctcccctctatgagttgtcacagaactctctgatgtatcatttcatctttttcagtatctttagatgtagacagtacctctgagcctggagtaaatgaatcctctaatctcgttttttaaagcaaaagatgaggcttcagagtcagttagatgaagatttcaatctcttctttgctttcgatggagcagtgtaactggacaaattctcaaggccccatatttcgtatacagtttttgtgcatcagaaatctcttgagtgtttttgagggttctggttcaaagtgtctcgtaagactatagtcaagatgttggccagagctgcagtcatctgaaggcccgatgtgcagctggagaatctactttcaaagtagctcactcacatggcgggcatattggtgctggctgttggcctcagttgacttttccagacagtgtcctcgtaacatggtggctgtctcccacagcatgagtgttcaaccatatttgattagaacaatggcagcatcctatcattcgacttaatagatcaaactgaatttgtatttcaacatttacataaagcaaagtacatttaaatttttttgtagcgatattaactgtttttgatgtgtatgggagggcttctgggcattgggggttgtggtcttgtcaaacagtactattgctttggcattgcacagaaaacttcgttttgaaacattagtcttttgttgaccatcttggtctagattaagttctccagaggccatgaatttgtggcttgaattttcatatctcatgtaaaatgggaagataattaattaaaacaggaggataattaattttgtaaaaaattactttctacggatttatttgaatgggcatttaaatcctttattatacataaaatattggtgggtagaaaacaaaattcaaatagattttattgagaaactctaatgtattagggttctccagagaaacagaaccaatagggtacatataaatatgtagaaagagatttattatgaaggattggctcacacaattatgcaggccaacaagtcccaccatctgccatccataagctgaagaaccagaagagctggtgatgcagttctaggtcaagcctgaaggcctgagaaccaggtgagctggtggtgtaagtcctagtcagagtctgaaggcccaagaaccaggagtgctgatgtctaagggtaggaaaggatggatgtcccagctcaagaagatagcttcaggctttttgttctattctggccctcagtggattgcagaatgcctgcccgcattggcgaagggggatcttactttactctgtctactgattcaaatgcaaatatctgccagaaacactctcacagacataccccaaaatgatgttgtaccagctgcctgggcatgccttaatccagtcgaattgacacatcaaattaaccatcacactcaacatcttatttggagcatcttttaaatgattttggtttccaaggaattgcaattactgaagtcttgtgttttccacagataaaccaagggatttgttttcttttttattttttaaagttatcaaaaagttggagggagaggcagcaagaagttttagggaaatacacttgtgagaaacaaggaaatacagtcatgcattgcttaacgatgctacattctgagaaatgtgtcgttaagtgattttgtcgttgtttgaacattatggaatgcacttgcacaaacctagatagtctagcctgctagtcacctaggctctgtggtatagtctattgctcctggtctataaacctgcacagcatgttactgtactgaatactgtaggcaactgtaacacagaggtatttgtctatctaaacatatggaaacatagaaaagaaacagtaaaaatatggtattacagtcttacaggaccaccattgtacatggagttcattattgacttaaacatcattttgtggggtatggctgtatttactttggacctacccccaccagggtcttatgccacctactaatactgagtaacaatccaaactcatcgtgtcccccccttcgtcctaaaacccaaacattctgctctgtgatcccttgtgatctggagctggtggccctgttcacctggtcgtggctccaagccatggcctgactggggaccctttcatttctccccccctccaaaagagcgagacctgtgggttctgccctagcaatgctgcccagctctgctttctgtcaatttactttctcctttcccactgtatctgccccagtgcccagtcatttctctcctgggctactgcagtggatcctaatggcctctgggctcctcatcttctctcaactgcttgcagattaattttgcctacctaaaattcatgttttctcaatgtttattaaataaaattccagtgtctcagctgctggaggtgctccacccaaaggcaccaagttatcttttatatttaatgccatcttctcctcttgacaatcgtaaaaggggactatacactctaatatgaaccctctccttaattctttgctcttgttctttctgtaaatgctgtgggccccaatcccacccatcctttaggacctatcttaaatgccaccacccctgcaaagattttcctcctgacctcctttttcctctaccagacctgttgtttctccttttaggtggctcactgaactttgtatccctcgtgttatttaatcataatcggtttatttaaacatagcatgtgtgtacttaaccttatcattcccgcattttttgctagttggacttgaacaaatagttgtataaatccattggaaaaaagtattcaagataggaaaggccaaaattactgtgttagtttatcagatagtgtaaagctatgcagaattttaaaagttatatctacatatactacagcacctacatgtttgtgtattattttgctaagatggctttgttctagtattgaaggatacagaagtgtggcattactttttattcatggctgcacctaaaacattatttgcgtcccagcagataatttgagaacataaaaatgctccaacatctctttcagttcgggatgttgcctaaaaccgtcgacaaacgctatgtttgagaagggaggctacgctggggcgccggaggagacaggcccttaagaaccttccagagatgccttaactgggctaacagctcgccgcgccggggcaggcagaggggtgcggggcgcgctccttccaggacttgccagtccccaagaaccaggccaaccggttccctccactgactcccgcctccctctgcaggcccagccctgcgccgcgcgccctctccccgggcgcccaggcccggcgggggcctagagggcagggatggcccgggcgagggacggggtcccggaggcgggaggcgggaggcgggaggcgggaagcgggaggctggaagccgcgcgctgtcggggtttcccggtgaagggcaggcaaacaaccggtcggtctgggcggagccgggcgggcggggcgagggcggagggcggagggcgcattgcctcatcctgtacattttactggaaatcggacgcatccggaggaggggctgggaggcggcccgggcaccgccaatggccgggccgggcgccggggaggtcggcgagcgctgcggcccgttaaataccctggcagtcccgcgccgcgcccgtactggcccgcgccgtccgcccgccgacagctccctgagccagcccgggaggcagccgcgcgcagcgagccggtggcgcaggtgtcggggtcctcgagcgcccagcctgggagcatgattgtggacaagctgctggacgacagccgcggcggagaggggctgcgggacgcggcgggcggctgcggcctcatgaccagcccgctcaacctgagctacttctacggcgcgtcgccgcccgccgccgccccgggcgcctgcgacgccagctgctcggtcttgggcccctcggcgcccggctcgcccggctccgactcctccgacttctcctctgcctcgtcggtgtcctcctgcggcgccgtggagtcccggtcgagaggcggcgcccgcgccgagcgccagccaggtacccgccggccccgcaccgctgcgtactcggggcgcgcacgcctaggaggttgggagcgggactccccagatggagggtggcccctgcgccctccttagagctaggacgtacgcaccttagccatcaattaccactccccgccttgcccgggccgggcgcctgcctgacctacacgcccttcgccggcccgcggaaccggctccctcccgcgggcctcgggggggcttcagaaaccgctcggccgagctctgactgccgggcgagtgaccaggagatcgctcgctctctaagaagcagctttgttgagtcataattaataaactatgatgagatttggggtctgatgtaggtgtaattttcttcttgtgaatattttagtggaaagctgtagcagaggataagggtttgggaatagcgttaaaggtcatgacttatttctcagtttttatggaatttttcagtaaaaagacttgaccgtcaaagaaaaggaaactgctgttatcaaggtgaagccgggctgaaaaccaactcaagttatgcctttagtttggcgagtttcggaagtctgcccggaatttttgcggtcttgtttttgttgtgtgtgccttaaaaaaaatggataagccatatctagcagagaaagacgtaatgttatctttcatgggctgcgaattggtttcctttcttagtgaaccgagttgcataatttgggggaaaacaggatgcccctgtgggtaggctagaaaaacgcctcgataattgaacgttgagagtaattagcatgattttaaagaacgtctctttccggtgtttcccactcttagccactcctgttttggttgtcatttattttaaaaagtgatatctcattttcattttaagtcatttaaaatcatgcgaaaagcgatttaaaccactgcgtagcagatccagaaagaatatgtgtttaggaccttttcttacccacttggccttcatctggctgaaactgttctgctggtcccttggtttaccacacagccacaggggatttctgaaactgcatttttttctttctgtgacgttggattatgaactgctgtcattccagaaaaatgctgtgttagattctggcaattctggtatctcttgaaatccctaaacttaaaaataaagccaactaatgtttcacttaccctatcattgaactgtttatctcatgtatttatgatagatacagatgttcaaattatgcgttgtttcttgccccatcttatttttgtacacttgatggagcggctgaattattcatttcctgactttgtgaatttgtgttcaacacacatactaagaggttgtgacataatagtgatcagaagtggagtactgtacttgtataccaaatgctaaagtgtatttcaaagtttaaaagtgaaacaagcatatttcctttttacttagaagacctgtgtaagtaattccaaaaacagtcaatgaggggaaatcctgtgtgcatatgtagaaatgtgtttaagctcagtgaatttaagcagcttttttggcacagttgaattgaaggaaataataagacataaatctaagacgttgttaattgtcaggttttcgtacatagagatctttgaaagaagttgttttgtgccttcttaggtaagcggaattgatagactttaaaatttctatgtgaacataaaaccattggtttaaaaagctaaaagtgcatcatttatcacttgctccccaaagtttttccaaagtcaagaataattatagaactatgagagtcaggatggcaaaatctgtcatccattctcatgggtggttagggctgagaaaaaaatgtgatccactctcatgggtggttagagctgagagatagagaggcttaatttgggtttacctattggctctgaggatccttgaccaaatttttatgaactttaatttcttagggtacccagtggagaaaggtatcaggcaacttaggacctttgagcagagctcgggactcacaaggccattgattgaccagagcaagttggaaaggttttgcaatgtgctgcttggggactttatacattaggcaacagctatacttttgggattattaacgtttatgtctgtgaagatatttaaccaggaatatgttttgttttcttttgaacagttgagccccatatgggggttggcaggcagcagagaggcccctttcaaggtgttcgggtaaagaactcagtgaaggaactcctgttgcacatccgaagtcataaacagaaggcttctggccaagctgtggatgattttaaggtgacatctatttttctgttttgagtatagagttggggagaggggttagtctgtcagggttattatgatgacctaggtccagtcatcaagtaagtcacttgaaatttttcataagatgacaaagtccataggacagagaccatatttgtctggtctgttgtatcctccttagcccagtgccagacacctggtaggtgggcaagagaaactcaatgaataaataaatgaaggcaagttcagaggctcaactgaaatggaacattttaactagaaagggaaaaatcaaatggtcttattaatttcatcttgacctgcgttgagctaaggtgaaagtgaaaatgaggaagtcgcaagatagaataaaaattgatatagaaaatcaatattgatagaaaaaccatatcagagatttatggtaagctataaagggtggtagagataagcctacttactgatgtatattaagaggaagtcattttgtatacactaaattggaaacttttttctttatagacacaaggtgtgaacatagaacagttcagaggtaagagttacttgtatttgtaattttttcagggctttggagtaaataatagagtgtaattatgggtaacatttataaaataaaatgatgacagaggctgtattcctttgggtacagaattgaagaacacagtatcatacagtgggaaaaggaaagggcccgattcgttgtctgatggacctgcttgcaaaaggccagctctgttgcattcccaatttttggtaagtatctcaccattttcctctgactatcctttggaaattattcctgggataattttagaaggaagtgagtgtgcaagttgcattttccttctttccagacaccacctcaaacaccaacgcccggggagagcatggaagatgttcatctcaatgaacccaaacaggagagcagtgctgatctgcttcagaacattatcaacattaagaatgaatgcagccccgtttccctgaacacagttcaagttagctggctgaaccccgtggtggtccctcagagctcccccgcagagcagtgtcaggacttccatggagggcaggtcttttctccacctcagaaatgccaaccattccaagtcaggggctcccaacaaatgatagaccaggcttccctgtaccagtattctccacagaaccagcatgtagagcagcagccacactacacccacaaaccaactctggaatacagtccttttcccatacctccccagtcccccgcttatgaaccaaacctctttgatggtccagaatcacagttttgcccaaaccaaagcttagtttcccttcttggtgatcaaagggaatctgagaatattgctaatcccatgcagacttcctccagtgttcagcagcaaaatgatgctcacttgcacagcttcagcatgatgcccagcagcgcctgtgaggccatggtggggcacgagatggcctctgactcttcaaacacttcactgccattctcaaacatgggaaatccaatgaacaccacacagttagggaaatcactttttcagtggcaggtggagcaggaagaaagcaaattggcaaatatttcccaagaccagtttctttcaaaggatgcagatggtgacacgtgagtattcttttatctcatgttcttaattaggtaagccacacttgttggactagtgagcatataatttttctagggtataacaaggtataccttagttagtggttggctaaccaagatgactggtgtagatagaaaccgccactcagtgatagctagtatgtcaagaaagggttttccttcaaaaaattttttggctgaacagataatctgttctaaattgataaaaatatctgtatcttcttgattaattgagtttggaagaccagcgtagactatgtctatagaacagaaacagttagatcatgattagggataaactgtgagttggtttgtagattgatcttaatctgtcctgatgtctttgtggccttgggcaagttatttaacctccttaggtctcagttccttgacgtgtaaaatgataatacctcttgtataggggttttatgagtattaaaaataatagatttaagttgatcagtatggtgcttgacattcttctttttcttatttctgatagcctaacccatcctgttccaactggggtgtattatcaatgtagcagaaaagacaaattatgctttgtaatgtttcatttgagtgtaccaatatataaaaagggggctaaaggaagatttttttttttttttcaaaagaacaacttagtgaaatcagaagtgattcacccgctttcctttccatgttccccaggttccttcatattgctgttgcccaagggagaagggcactttcctatgttcttgcaagaaagatgaatgcacttcacatgctggatattaaagagcacaatggacaggtgaggaccttgacagagtctgaaatggcaaagagggggtcatggtgaagtgaatgatgaccagccttatgtgtagatcatcttagagctcaagatcaagagagtttagttaatattaactttgagatgttgactttttgctaccatcaaccttgaagttattaatgttaactttgtagctgtttgaccaaacactgagagtaataaagccacaccctaggcttactttagtttccttgtcttacagtatctgattgcttattcaaaggatttattttctctctgtgggtttttccctcagtcatagtttagtttcatattccttgttatgataacattgtatgtttaaaatatcttttttcctctggatatccacagagtgcctttcaggtggcagtggctgccaatcagcatctcattgtgcaggatctggtgaacatcggggcacaggtgaacaccacagactgctggggaagaacacctctgcatgtgtgtgctgagaagggccactcccaggtgcttcaggtaagaggcagcaaaccaggcttccatcattgcaaggccagagagatagagttggatattagaagtcggatataggttgcctgttgcaatgatctattttgagttaacttattcatttcttggggattctaataggtatatgcgcagcttatgtagctaacagatgtctgtttttaaaatctgcaggcgattcagaagggagcagtgggaagtaatcagtttgtggatcttgaggcaactaactatgatggtaagcaactgaaactttattagattcagagccacttagggggaaccataaggtctaagggtgctaagtatactaagaaggaaggtaattaaagctaaaatattctgtaggtaaaattagacccaaaaagagacaatattcagattgccttactagttcttgtggagcccatttataggttaagttagaggccatcctcagcatttgtcattatagaaggaccaaaagacctgatgggatgcttgaccactgcttgattatacttttcttctaggcctgactccccttcactgtgcagtcatagcccacaatgctgtggtccatgaactccagagaaatcaacagcctcattcacctgaagttcaggagcttttactgaagaataagagtctggttgataccattaagtgcctaattcaaatgggagcagcggtggaagcgaaggtaaattcacagaaaaggtttaagatggggtaggggagaaactggttatatagcaaaagaccttgcttccaagtacagattcaaacttctttcttttttttctgaaattaatggtgtgagtagcaatgtatgggtggttaagaagcccagaattttttttttttttgagacagagtctcactgtgtcgcccaggctggaatgcagtggtgcgatcttggctcactgcaacctccgactccctggttcaagcgattctcctgcctcagcctgcccagtagctgggactacaggtgcctaccaccacacccagctaattttttgtatttttagtagagacggggtttcaccatgttagccaggatggtctcgatctcctgacctcgtgatctgcccgcctcggcctcccgaagtgctgggattacaggcgtgagccaccgcgcccggccaagaagcccagattttaacagatcatttcatgtgttttcttgatttgctttaaatccatgaattattatccaaaaggtcatttaggtataaaataaatagtctttgaaaggtaaagaaaatgcttgaaattgatattgtcattttggcttccattttcatacactgagaataaaggtgctttttgtaaggatttcttcattgttgtaggatgtggaattcatcttctggtttttaagctggaaaatagtttattcttttaaaattttggttttattcactgagtatatgggggaaaaatgcctaagtcataaaccatttggacccttgaggcttactgactagtaaaataggtgagagatatagctaaatataactctacagggaggctaccaaatctggaaatgtaggtgaatacataataaatggtttactgataggttatgacataggatttaaaaatatttatttttctacattttatggccaccctgtataaaaaggtacattgtgacaagaggcatatagacaaattaataggaaatttaagaggaataaaagattccatttagcttgggattaagcaaggcattttggagaagggagcattcaaagtgagtctctgaagctgaatcagacattcaggagactgggtgaaaagtgtattctgaggcatagtatctggatttttttttttttttttcctccctcttgcctttgacaaggatcgcaaaagtggccgcacagccctgcatttggcagctgaagaagcaaatctggaactcattcgcctctttttggagctgcccagttgcctgtcttttgtgaatgcaaaggtacaccagagttggaatggccttctgtacaccctctcaaagtttttgagctcctttcatgaaatttcccccttcctgatgtctgataattcatttctttgtcttcaggcttacaatggcaacactgccctccatgttgctgccagcttgcagtatcggttgacacaattagatgctgtccgcctgttgatgaggaagggagcagacccaagtactcggaacttggagaacgaacagccagtgcatttggttcccgatggccctgtgggagaacaggtgagaggcacaggagggagaggaagtattttttggcactgcagtctgaaacagaaagggagatgaggctgtgcagggcgaaggccagctgttgctcttcaggtggactctatcagtgtctgtgtctcacggtagctgtcatagcattgtggagttactcttcgtttggaaacagcaattaagaaatttgagggattatccatagactcaaaatggttagaggtcaggtagtattctgtgacacacacttagggttagagtaagtcagaatggtttaaggttcggaaagagaagataccaaggttcctgcagataccaaggaaagagaatcttagtcttgtaatgtatgagccttcaaatattgtggatattaaatgagttgttacatgtggagtgctcacaatagtcccgggtacagagtaagagatcagtgaacatcaatagttagaattatttctgtctatgaagtgatactgaacaaaaaatggaaaaattacttatgtaatttcaaacctagaaatattttgttttaaacagcatatttaatgctttactcatcaaatatggttatatattatcattgagtattgaatagtttcatgagtaaactttttagataacaagaacttattctttcaagaacttaaaatgtttttgatggaactcttttcctgggaggaatgagggggattgtggctgtgggtaggtcattacatactttactaatcacaaaataaaatacgtggaatgcagtttagctttttctttgattctgagctgtcattatgaccataatgttatagtagcccctatttatagagctctttgtaatttagaaagaatatttctatagtttgtaaaaagttttcatgtatatcatttaatagttagaagaactttacaagtttcaagtttcaactgagaaaattgatattcagagaggttccaaggaccagaaccatcattaacttgtaaaaggcagagtcctaagcccagtatttgcttctacttcactgtttgtggtgtgcagtcatataactatgctctcagggatcattgagatattaagccatttaactcttcattaaatgttcccagattatctcctttttgctttggtattttgtgtgtgttgggcaggtagaggctcttttccctggcttttattgtcatactgtggtcgtgtgtttccttctagcagctatcagttgtatcccctaccccaatcgcctttcatctaaattgttgcttctaatctgctggaggctgagagatagaaaataaaatttgtcagactgggatgtaaaatgaatcactctgaatgagccgggatcttttctgtgatccatgaagttacgtgtagatgctttaatacttggatatcatgacagctgttttgacttgaatggtattaaggatttacttgtgtgtgtatcataaaatgtgggttttctgttcctgttagttgaggctgacttcaagataagtgagatattataatatgccttaattactgtcttatgttaaatgttctcacaaatagcaagagtaaagattaggaaaagaatataggtgttaagtttatggagattttcaacttcagataatttttagtggagatgttttactttcttgaactcaaagattattataagagatctgaaataagtttaaaaggagtttagtatttttaaaagtcacctcaaaatcttgagaaatattgtgtgtatttcttcgtatacttacaagttaataggagtagtgtagatggtataagaaaggaatgaaactcagaaggaaatacaccacattggccataagaaataaacctcacaaattttatttgtttctcttccagatccgacgtatcctgaagggaaagtccattcagcagagagctccaccgtattagctccattagcttggagcctggctagcaacactcactgtcagttaggcagtcctgatgtatctgtacatagaccatttgccttatattggcaaatgtaagttgtttctatgaaacaaacatatttagttcactattatatagtgggttatattaaaagaaaagaagaaaaatatctaatttctcttggcagatttgcatatttcatacccaggtatctgggatctagacatctgaatttgatctcaatggtaacattgccttcaattaacagtagcttttgagtaggaaaggactttgatttgtggcacaaaacattattaatatagctattgacagtttcaaagcaggtaaattgtaaatgtttctttaagaaaaagcatgtgaaaggaaaaaggtaaatacagcattgaggcttcatttggccttagtccctgggagttactggcgttggacaggcttcagtcattggactagatgaaaggtgtccatggttagaatttgatctttgcaaactgtatataattgttatttttgtccttaaaaatattgtacatacttggttgttaacatggtcatatttgaaatgtataagtccataaaatagaaaagaacaagtgaattgttgctatttaaaaaaattttacaattcttactaaggagtttttattgtgtaatcactaagtctttgtagataaagcagatggggagttacggagttgttcctttactggctgaaagatatattcgaattgtaaagatgctttttctcatgcattgaaattatacattatttgtagggaattgcatgcttttttttttttttctcccgagacagggtcttgctctggcgcccaggctggagtacagtggcatgatcttggctcacttcagccttgacttgggctcaagtgatcctcctacctgagccttctgagtaactggaactacaggtgtgcactcctcgcctggctaattttttattttttgtacaggcaggatcttgccaccttgcccaggctggtcttgaactcctgagctcatgccatctgcctgccttagtctcccaaaatgctgggattacaggagtgagccaccatgcccggctggcagttgcatggaagagaacacctctttatggcttaccctctagaatttctaatttatgtgttctgttgaaatttttgtttttttacctttattgaaacaacaaaaagtcagtattgaaacatatcttcctgttttctgttgtcaaatgatgataatgtgccatgatgttttatatatatcattcagaaaaagttttattttttaataacattctattaacattattttgcttgccgctggcatgcctgaggaatgtatttggctttgattacacactaagtttttgtaataaatttgactcattaaaaaccttttttttttaaaaaaaaaaaaaaagaaaatctcattagtgaacttatctttgcagctgagtacttaaattctttttaaaaagataccctttggattgatcacattgtttgacccagtatgtcttgtagacacgttagttataatcaccttgtatctctaaatatggtgtgatatgaaccagtccattcacattggaaaaactgatggttttaaataaactaattcactaata

SEQ ID NO: 62 - DNA, 9798 bp, Homo sapiens
aggactcggccccatggagacgccgccggccgccgctggcgcatggcggggtgaggcgcggcggggagggtgcgggcctcggcggggaagcggcagggagcgctccggcggggtccgagccgagccgaggggaggggacgggaggggacgggaggggtggagaggggaggggacggaagggtcggggtcctgttccccggcccgccgggcctcaggacccctccaactttgcccaagttgggagagccggggaagagcaccaggttcctgatcgggatcgcgggccgagcaagcgcgggtctcgggccgggacagcctcggcgtcaccagctcccggcagccaaccaaagttttccagcaacttttctccccacgggtcaccccagaaacttgccctccccggctccgggagtccggccatgggccttgcgctgcctgggcctgagctctgagtgccggacgggtgggcgaaagtggtggcctcagtggggaagccttgggccccgcaacgcacttccagccccaggattccatctgagagccccgtccctgccttctgggtcccctgggttggcgtgggggttcgaggctttacagctggggtagttccagtcttagttcagactaagttccgatcttcgagccaccagctaacagctggatgaccttgagcacgtttttaatgtctgtgcctcagtttctccctttatagaatgggaatgggaatgcctagctgggagagcttttgagaggacaacctgaactaataacacgatgcagtgtgtagtgccaccaatccctcatcctgctggatgtggttttgggagggaggttaggagagagcgctattcaccgtccctaaccctgttggttgttcagtaggagctgtggcgcggggccttccaggagtctgagctatgagtggcccctgtggagagaagcctgtcctggaagccagccccaccatgagtctgtgggaatttgaggacagccacagccgtcagggcaccccaaggccgggtcaagagctggccgctgaggaggcctcggccctggaactgcagatgaaggtggacttcttccggaagctgggctattcatccacggagatccacagcgtcctgcagaagctgggcgtccaggcagacaccaacacggtgctgggtgagctggtgaaacacgggacagccaccgagcgggagcgccagacctcaccggacccctgccctcagctccctctagtcccgcggggtggtggcacccctaaggctcccaacctggagcctccactcccagaagaggaaaaggagggcagcgacctgagaccagtggtcatcgatgggagcaacgtggccatgaggtaagtgtcacttctgtggccaggacacatgaggttcgcatctctcctgtggccaggacacatggaaggatgactgtctctgcagctctggtgggctggaagaagtgacttccttcttagggactggtctagagggagggaaagccttttatgaggctagggtcgcgctactggtaagtgacagaggcagggttccagcccaggtccctctgtccgcagagcttaccttatgctgtgggtccctccctgaggccagcactgtgtctccactcctctcctgtaatgtgaggcagggctgtaaaggggaccagcccgtgggcagctgctcactcacccctcggaacctgatctcaggtgggtgttgtgaggagggagtgtgcggatcccggagaggagcaagcgttcaggaaccatagtagtggtagtaggcagtggtagtagcagttgttgttgttatttcaggggctgggcttctgaggccttcttgtctcagacctgggctcccacgaaaacaggtccagtgactgtgtccaagagtgacctcaaggctgggtccagctttacatgggttgtgggcaggtggcctgatgctctggcctcaggcgagctgcaacttggatccctactgactcagctgaagcagcctgggctggaccagtctctggaggttccccggggccagagccaggactcagcccccagtgactcccacccccatcccccagcacaggaatggggtggggaggtaggggcagagagggaagccagggctgctgctgaccttgggaaacccagacttctcccgtcaatccaggctccaccctctggccccacttttttcccagttccctccaaggcaggctgatgagtcagtgctgggtggatggctcacagggaaaagttcctgttggcatggacggggagaccccagacacagggttgagaagggatgattttctggctgccctgagggagctcctaggtgggctgcccaaggctggcatgacatcagcctctgccctccctaatttgtggcccctgtgggacaagttcactgtccagctggccctggcccagctcagcaggcatgcagctgagtgctcttccctccttctgtcaccttcaggccagtcttcctctctctgacttgggctgagcctggatgggaggctgagaaaatccagtttccatgccaagaggcagcaggtcacagcccatgcttcgagattagaaggggtccctctcagtgtccagcctcatgtagctgggctaggagctaggttggatctgtgtgactccttcctctggaggtatgggccaggagcggctgagccctgggagcagccatatgcagtatgtgtttgtatccagaaggaggagggacatgggaggaggggctgtgatgaggggtgctcagaggagcctgctcctgagaagcagagccacgcacccacctcgggggtttctgagctggggtagtggcaggaggggaattccagcctcaaacttcctgtctcagctgctactcggttcctgcccggccaccccccctccccaggggcaggcgggctagcccccccatcatatgcaaatcatggggaaattcacctctgtttccttctaagggaatttttttccactcgccaggcccagcccaggcatatcttttcacctggggaggctggcccagccctgccttctgtcctggggcaggagcagcctagctggagtcttctacacacacatcctatcagtgtctgcttagcccggctgggggaccctgaccttacaggcaaagagaactggaatgggggcagggatgtctggttttcctgtgccagcagcgcttcctccagtgcagtgaaagagactaaagctagctgtaggggggcactccaggcctcatgtgctctaccaggaggagggctctgatagcgcccactgatcagtttttccatctgctgagggaatattcaggtgctagggctgctgagaaccgacttgtcccagccaagattttcagtgcccacaggcagtgcactgccctgagagccctggcatcccattagttcccagtgctccaagatactagcctaggatcatgtgcccggagggaggcaggtgggcggatacatgcgcacactgcatacctgagacaaggagccaggcctgggatgacccagctgccatggttttgagaggcaggccagaaggcccaaggaaggggggtgatgtgatgggggaagcactgggcattgtgaagacacagaccagggacctgacctattgtggcaggtcagggaaggcttctcagaggcagtgacatctcacaagggttctgaaggaagagcaggagtttgccagcagcattgtttctcccgttcgccacctgtctctcataacacactttgttcaaactcaattttgggagctttgttctcccaaataaattctggatcttctgttagagacaggaaggcaaccgagtggcccagacctgggttcgagttctgactgtctcttaccactagccaggtgaccttcctttccttcacggtagcaagccctataagaatgaagccatatatctggccaccagcgggagctcagtgcctgcgaatccctgctcattccctgcgatcagggtctgtgcctgccttcgtacctgcctgagcattgacgtacagggtagtgataagcataggccctgggcttgcgtctctcttccaccgttaactgctgtgtgaccctggtgactaagctgccttctctggaccacagttttcatctgaaaaacagggaaggagttgatgatggtatagtgccctcctcacaagcttgctgatgattcagtgttagacacttataacagggcctggttcacagctctcagcaaatgggaacttttattataagcaggctggcagatgtggcagagggaccgggaaggatgagtgctgccctgggctggactttgtctcccctacaatttagagaccttcagaccctggtgccccagtcttgcccccaaatagcctccatggcccccagctgccccacctccctccctagcttctcttagggctccagctatcaccccttacctcccccactcccattaaagacacccacaggatgtggttggccctggacttgcctcttttgcgtaacatttattctgttttatttgccaaatacgagagtctaagctgttcactgagggggcagtgagacgtggggctgctggtcctaggagctcttccatgacacctagtgttacctgggagccccaagccccagtcccccatccctcaggaaatccagttggaacccctactttgcagggccatctttggcctgaagccaccaggaaagctgtcccactgactgacccctcttaaggaagctgcagactgctgggcccattttcagatagaggaacggagagctgcggcagcccaggagccctgccaggcttccttctgggtgcagccacctgtgggtggggcgcggcctcgtctgagaccaaggcagggcccatgccttactcagctgtccttgctaagagtcccctagcatcttcctgatggtctttctgccttggggtgaagaggcatttgggggaattgccatcttgggaggaaaagcagtatcctttcactttcagactgaaaggctcctggggaacttgcttcactccggcgctttctgtcccatgctgaaggctggagtcgccagccccttcccctttgcctttctcaggccccagtccctgaggtgtgtgtgaggactgaactttaatccggaacaatctggtttctcctcggtcagcccagccggtgcttcccccgcccccacccacgctgcaagaggcgagggaggggtggtgactcagtgtgcatgtgtacatctgtccctgtggtcccggcagctcgccgggtggggcaggaaccagaagtctcgcggcacctttcccccacccccaggtgtgttgcaagtggcctggccctcccccaccgtggggagcagtgctgccagcttcctgggcgcttcctcactttcaggagatggagcctcagggaaagtcccagcggggcctggccatcctggagctgtgggaactggcactgggaatggaggccttggccttgggccccacctgcagagggccagggcctgagccctggggaaaggggaaggggctggtgactccaaaggggaagggactgctcactaccaccaccaaagccagggcaggggtggggtgtgaccacctccctcctcctgctcaggcctagggggtggcaggctggccatcagtgtgggctaaccctgtcctctccctcccagccatgggaacaaggaggtcttctcctgccggggcatcctgctggcagtgaactggtttctggagcggggccacacagacatcacagtgtttgtgccatcctggaggaaggagcagcctcggcccgacgtgcccatcacaggtgagtggtgcctctggaggtgggatggtcttactgccccagcagccctggttctccccaagagagaccctctgggagtgacctacaacttctagaactcaagcagggaccagcatttcttttctcagttttttctgtccttagcaacctgctctgaatggtggtcattggaggtcaccttgtccagtcttctgcctcagatctggagcccctccctcatcctactggtgggcaggtcgctctttcaacatccccagtggcagaagcgcagtatcacatagtggttaagcctgtgggctctgagtcgagacagccagagttggaatcctggctctgtcccctcttggcgccctggcctggacagggacccctcttagccctgctctgagccacatgctcctcatctgaaacatggggtcggtgtcagcagggggtgttgacagcattgccttcctcgtgaggtcatataagttaacacacggtaagtgctgagaagagtacctggcacatggtagatgctcagtgtatgttagctgttaccactgttcttgcaagagcccccagcctttggaggtaaaaactgaatcagtttctctagaagtcttgagatctgggggcagcctgtctgggactgtaggctccaggaagaggggccctttccacttgcacacttctgtgtccctgtggtcccagcagctccccaggtggggcatggtgagtggcctgaccttttcccaccatgggatttagcgaccttgtcctggcaatgcaagggacagagccaagatacttctcccaccccagagcaagctgcggctcattcacggacccctcagaacaggctggatgaaagccaaagccaagaccacatctggcttgaacaggcctgatgtccagaaggagaaaaggaacaaggccagctctgtgcttggagcctctgccatgcaggccctgccgcctgtgttcagatgttcttggtcttcaggcagcaaactgtgccacgccaagggaggggctggggcatggaagaggcctcagcagagttagttcttgccccggtgaccttggcgttaaccactcctgtgtgtggccatcagcaggttagggagccctgtaggcctggctctaggtcccgctgggccctgacctgtgtgcacccgtcacctcccagaccagcacatcctgcgggaactggagaagaagaagatcctggtgttcacaccatcacgacgcgtgggtggcaagcgggtggtgtgctatgacgacagattcattgtgaagctggcctacgagtctgacgggatcgtggtttccaacgacacataccgtgacctccaaggcgagcggcaggagtggaagcgcttcatcgaggagcggctgctcatgtactccttcgtcaatgacaagtatgttccctcccagaggccctgacagacttggggtccacaggggaagccagaggtgcccttggcaagggtggagctgggggctgggctctgcggggccctgtggccatgggaggttgcgggtcttggctccaggcagctttgagagtgagacggatagctcaccacataggagaaatcagaccgggaccaggcaggctgtggggtggagagagtggctaatttgggagatagagccgtagcacttatgaggggatgtatgtggttgatggttccaggtggcctctctacgaaccaacatggcatctctcgagcagaggccatgggccagtgggtgcgggctgccatcccccgacgacctcagagagggagttcccctaaaggtgcccatgggctgtggccctctagaccggggatccctttctcctcccttggtatgatcccacccatagagcagttttgcggggtcctggacaggccccagttttaggtgtcactctcctattcttcccagcaaggcttgccatcggccccttctcagcaattagaagtccctgcatggctcccacctccagagagttctttgcaccctctgcaggtttatgccccctgatgacccactgggccggcacgggcccagcctggacaacttcctgcgtaagaagccactcactttggagcacaggaagcagccgtgtccctatggtatggaacccagcctgccctccccggccctcctcactcctgcccttcctctcacctgtctgcctgtgccctgttttcctcttggggacctccaccattggaccacccaaccccgtttcctgtgccaccccttccctgctctcatccctggttctgaagtgcccctgcttagagtccctcttgattcctcttccaggaaggaaatgcacctatgggatcaagtgccgattcttccacccagagcggccaagctgcccccagcgctctgtggcagatgagctccgtgccaatgctctcctctcaccccccagagccccaagcaaggacaaaaatggccggcggccttcaccttcatcccagtccagctctctgctaacagagagtgagcagtgcagcctggatgggaagaagctgggggcccaggcatccccagggtcccgccaagagggtctaacacagacctatgccccatcaggcaggagcctcgcacctagcgggggcagtggcagcagctttgggcccacagactggctcccacagacgctggactcactcccgtacgtctcccaggattgcctggactcgggcattggctccctggagagccagatgtcggaactttggggggttcgaggaggaggccctggtgagccgggcccaccccgagccccttacacgggctacagtccctatggatctgagctcccagccaccgcagccttctctgcctttggccgggccatgggtgctggccacttcagtgtccctgccgactacccacccgcgccccctgcctttccacctcgagagtactggtctgaaccatacccactgcccccacccacatcagtccttcaggagcccccagtgcagagcccaggggctggcaggagcccgtggggcagggcaggcagcctggccaaggagcaggccagcgtgtatactaagctgtgtggtgtgtttcccccgcacctggtggaggctgtgatggggcgcttcccacagctcctggacccccagcagctggctgccgagatcctctcctacaagtcccagcaccccagtgagtaagctgcctgtggctggcaagggcagcacccccagcctccaagggccgtcaggctgggctttgggccattgagcagcccattcccagccctgaggcccaccccagaggctggacagagggaggattcaagtcgggaaggaaacccacaaaccaaagatactgtaggattggttctggcccatgcagcacctctagctgtctgcctcagtgggtcagaagcgatcaccctgttgatacacattgtatctctgtagtttaaggagacgctgccggtaacggcgtcggtccgtggctgaggcccaaaccgtcttttctctcagagggtggggagggaggtgggggcagcagaggcctgggctgggtgccctgtgcacgccaccccacttccgccctacccctgggacgttggccttggctggctagttgggcaccgtgtgcctgccctccaagggcctcctctacgccaatgaggcctcatctgtgctctcgctgggcacgtggcttcatgtcagtaagcaagatgcttcttaataacccaccttctgccccactctattccttatcctgctgcccctgtaggggtcaagggccctccgtctacaccctcttcttctcctccatcctttattcagagtcatctcgcccttccccatgggtgggggaacctgtgtttgtttgtgtgcacatgtaaattttaaatattttaagcagaaagtccttacctcctgtaacacatcaataaagtacaatcattgtgagccctttcaa

SEQ ID NO: 63 - DNA, 509421 bp, Homo sapiens
cttgagcgtgcatcattcagaagatataagaagcttagaaggtagaaaagtggatttctttgatttttcagacgacattgctgaaaaacatattaccacagacaatttgaaggacattgactgtaagtaaaacaataaatattttcttttagtgtggtaggcatatgccacacaaacgacatgatgtattttcacctttctgccttaattaggggtgaggaagcgatgaaccttctgtcctgatttgattttcatccattgttaaaagaaatactaatctagaaaaaggtgcaaatacagtgcacacacgcaagtatatatatgctcatatatttttatagtattttagaataagatccttggaaaagaaagagaaacaatatgaatgccaagagaagaacacacagaagcaatcctggaaatgacagattttaagattaatgcactaagttagatgaattttaatggtaaagaagtagaaagttaatagagaaatggaattttctatttacttggataaaaggacttagtgtcatacccatggatcattttaaacgagcatacatgtgggcattttacgaataatacaatttaaccaattttattggtagtttctataaagtgttctgaaacgtttctgttgtcgggtacagtaatttgccaaaatctccattaaacgtcaggttatatgtgttacgtagtttttcttttgcctctattattttattacaattctagcttccttcactaacttttcttagctattgttaaattatcattctctcataactaaagaattttattaaatgagtcaataaatgtcaaattctcaataagaaaaaagaaaatatttattttctattataattacaataattgtttgtacctggtatttttaatatgtgtaaaaattctaataaagttatattagaaaatttatttaaagccagccctatttcaagctatataattattttacataactgtatatttaagatgaaatttattgtttcatacctgttccaaagttggtatttttcttgtccaaaagagtttgagagacacttgcattgtaacttcgtcttgtgtgtagtggtaatgtaaaacaattttgccactaggaaaaggtatggatatagtgctctatttaatttgtgattgtgaaatcagtgatgtattatatacaggagtatccaccccaaatgatttacatttaaaaataatttttttacaggtctaacctgcttataaagaaaggtcagggagcatttgtaaagtgctttattgtttgcaaagtgctttattgtttacaaaggacctaaaggtcctttgattattacacactgtatgtctgtatcaaaatatctcaggtaccccataaatacatacacctactatgtacccaaaacattaaaaataaaaaattaaaaaaaataggttctacagggctctttcaaatccacatttctgtgatttctataattttagagaggcaatatgtatggtatagtgggaagccagacctggatttactgtatcctggccttgagcaagtaattcagcttttctgaacctcaattcttcatcagggacaatttttagtaacttgcagttctagtgaaaagatgaaatgagataatgtagaaaagtgcaatgctcttaactgcttgatggtagagctattgttaatatgtataattccaattacagcaatccttttaatattccacagttgctgcagagcccattagagtcatgcctttgaaggggaatataatagtactaatcaataactggttttggtgaattaggaaaatgaacagagaatttgttgaagatgttaaaagtagaggagagaattggataaaattgaacccgtagtgataatttgaaatgaaaaccaaaataaaaattaaaagcaatgcagatggaaggaaggccatcgcaggagtaagaaatatgtcaggacctagctaagtggaaggaaagagtgagaaccacttggctaaatcctgggcacacaatttcaggactggtcacgtattagggcagcctccagcaatctctgtggttcatggacatggaacatttcagcagtggagtggaatggctttagcatctgatagacctaggttaaaatttgcgctgtgccacttgctagctatctaatcgtagacgagttatttaacatccttctgtctcttctataaaatgagggtgataattctacctcatggagttgctttgaagattcaataaggtatccatgcaaggtgttaacttgtttttctgtttattgcctcctcttctgccaacaaaaatataagatttgcatgagtagggtctttatctctgtccctgttgtataaaatataataataaacctttgaatattttttgaatgactgaacgaatgaactcatcaaagctgtctgtatatagtaaggccatatgcctcactgaatgatatgaggaaaatactcccaagctacagtggcatttataagatttttgtcatgagccatccttgtctaagtttctattatatttattgttcaaccattcaaataacatttaaccgtatggtgttttacatcatccattttattttatttttctgattgtactgttaagttaatgaagggtagggggtattttgcccatcgtcatccagtctgatgctatgcttggagtatcaccagactgaaataagaatatatgttgtgaattattgggccatataatgagaaagttatacatgataatggtgattggtgaatggaatttatacttgctaatggtatgattttggctgaagatgaaaatatattttcttcaattgctatttgtcgatgaaaggctgaaagacgtgatataaatcgacaggaaaaggacagaaagatctatttgacaatatatatatattctaatcccagaacaaagggtacgtgttgctggatattttgagattatctttggctaacatgatctctcttgcttctgggactttgcgcatgtgtttgtctggaaaattgcccttacatccttcccttcactcgacaattcctactcacctttcagttatcatttcaatgtcactttctctgaggtaccatcctaagtctggatgaagtgtctctcctctgggctcccataggaccatatatacttttgctattgtattaggttggtacaaaagtaactgtggtttttaatatatctaaaattatattgtaattgcctatttatttgtttgtgcctcctactagatgatcactccacaagggcaggagttgtatatgccttccattatactctaatacagtacaataaatatctaacacagctcaataagtatttcttgaatcaatgaatgaaaaatgactattaataaatggaagaaaaaagccctcaaaataatagctgtcatttactggatgtcttgttaaatgactgggcttttatagatgttaatatttaatctttgcaacagtccagatggggcaattgaagttcaaaggacttaacttggtcaaagtaataatgctgagatttgaaccaggatctctctggatccaaagcctctgatgtttctaattggtgatactgcctctttcataccttacatttgtatacgctactacagggcacaaaacatcattattccttataacagctttgtgaagctaggtattatttcccattttatatctagtaagtggcaaagctatgactttcaaatttgatattctggttcaaggtgcattccctttccgtgataacacagctgtctcattctaaaggatttaaaggtgtagccctttacaaaaatccctgagatgataaaaatttagaaaataagaagtttttgattcatacatagcagaaacagttccagagaggtgtattttagcagggctagagtaaattccaaattttctttgtaatttttccttgagaaaagacaaattaatcaaattgggaataattgctgttaatactatcaagttctttcttctctttgatgtctgattatttcttggcctcatattactaccagctcagaatcgatagaatccctactgaagaaactattgctgatggggcagcctggtgctcttgggtgaatttcaggcagttccttcctaccagtggcactccttgttgcagtttgtttttcagttactttgcttatcctatacccctcaaattttggcttgtgctgggagggagcttagtgggtttgccctagagttcattgactttggccatccttggcctatgactttacttcgctctttagcctcctgccaaaaattacttctgttgagaggtaagggggtagagatgaggtagtggggagtgttgtatttttgaccgaaagaggcagagggccagaactaaggaaagcaattctctacaacttcttcctgaaaatggggaagtctctcacacatgcagagaaaaaaaaaatagtgtgaaaagcagttcaaatgtattttcttagtactaccatagtgtttggcagctgctttgacatataggtcactgaacagtagggcaatgcaaacacagaatctcaaaaaggaaagagtttttttttttaattttcaaaaacattttttaaagctttgaaagattatagtttctaaaaccacaattaaccaaagttctattataatctcttaaaaatgttagatttaaatgcaagacttagaaccaattgcaaatttgaaaataaattgctctaaaacaaatattattcaaacgtatatcttgattattggctattttgttctgcactgtgctgttctgtaaatgtttgatgaagccatagttcattatttacttttctttgatctccctgccagctaaatgtatttgtgtttctgttttccttgtgactttgcatttgtactatctgccattggaatgttgaatctacgagtctgattcttagtaggggagaaagagagagcaatttggataacccaggcctaaataggttgtgactgaataaaaggaaataccaggatagttcttcttaaattggggtatagtttatataaagtctgtgcctcttaaacttttttttttttgagttgggggtctcactttgctgcccagtctagagtgcgctggtatgatcatagctcaccgcagccttgactcctgggctcaagtgatccttccacttcagcctcctgagtagctgggactacaggcctgagacaacacacctggctaatttttaaaaatttttgtagagataggatcttgctatgttgcctagtttggtctcaaactcctggcctcaagcaatcctcctgccttcgcttcccatagtgttgggattatggatgtgagccactgcatatggcctttttgaacaaacgtttttttttttttttttttgagatggagttttgctcttgtcgcccaggctggggtgcagtggcatgatctcggctcactgcaacctctgcctctcaggttcaagtgattctcctgcctcagccacccgagtagctgggattacaggcaagtgccaccacatctagctaatttttgtatttttagtagagacggggtttcaccatgttagtcaggctggtctcgaactcctgacctcagatgatctgcccgccttggcttcccaaagtgttgggattacaggcgtgagccactgcgcctggccactgtttgttcaacaaacattttaaagtatatatacatccatctcaccaccacccagatcaaaatacagaccatttttggtaccgtcagactctcaggtgtgctctctctcttaggcattacctactcccaaggataaccactagtctgattttcatcaccatacattagttttgtcagggcaacctttttttctttttttcttttttttttttaggcagtgtcttgctctgtcatccaggctagggtggcgggatcaccgctcactgcaacctgcaacctccgcctctcagtgtcaagtgatcctccaaccttagcctcccaagtagctgagactacaggtatgcgccaccacacccagctaattttttgcatttttttgtagagacgaggggatctcactacgttgcccaggctggcctcaaattcctgggctcaagtgatctgcctgccttggcttcccaaagtgttgggattacaggtgtgtgccattacttaacatgggacagccatttttagcagtgctttttacataaaacatcatgaatgggagtgactgatacaaagtttgaggattaggaataagttcagtcttttgtcatgacatatatgacagttgtgatgtgttgctgcatcccaaagacagacattcccaactggttccattgagttacacgtttgttagagggcagcctttggctgaccctgccagttgcctatacaatacatattctctttttctttcttactaaagagaatcattatttttttcagggcaggcacatacatagataaaatattcacctctccagattcccttacaaataaaagtagtcatgtgaccaattctggctaatgagatgaaaggaaaaagtctggcagagtagtctttaaagaaactttacaaggattagactttgtacttttctgcctttctatggaacatggacatagaggccaaaggtacattctcaatcttgtatccctgaggacaaaaaaaaccaaaaaacagaaaaacaaaaacaagaacaaaaccaaacagacttgaaagacgacagagcaggtagaaagaaggaaattatttccttgataacactcttgacaggctgcaccagctttggtccacctatttctgagtttcttgctacatgagaaaattactttcttgttaagctgctgtttataggattttctgttattggcagctatttgcatttctctcatatattttccaaattttgattgggacccttagagatcatggacaccgaaaagatgatgttattaaaaccagttttctcaacatctccaagtcactttatccttattttatatactaccaaccccaaaagcactggttgaaaaacatttagcttctactctttctctggacagttatttacaactactttaagccagaatgataattgttaacctccctaagttcccacacaatgatttgtttctgaacgcttctctttttctaaaagtacagcatttaattttcttaatgaataaaattagtttttttttagagttgatattatgctttccaaatgtctcaatgcagatgctgtaagaatagaaatgggaaccagctgtttaaggatttcctgtctcacaaataaccctcataagtctgtctttggattaggctacaggtcaaagaatcagaagattttctcatttatttgttttatatgtttatgtttgtctccccttcactattgtttcttagagtctagcaaactgagtggcacctggaagatacttatttgttgactgactgaatgaatgactttactagtgtaaagagtaacacagtggactcctgtgtatcagtcagtataggttaggtgatgctatagtaacaaactgcaaagtcttagtggcttcatacaacaaaagttgatttctcaattacattatattccaatgttgatcactttggggggctctgtttattacagttacttagtcactcagaatgaaggagtctttaccttgtcagacgagtctacaattgccaaggtgggaaaggggatattgtgactttgtacattggtttttaaaggcttcttgatgaaagcaatgtacgacactttcatattttattggccaaagtcaatggccagtctccaggtaatagggaaatgaaatatcaccctgctcccaaatgaaggagaactagaacatttaaatagctgtaatgattaaatatgatcagtacaaaattagagaaactgatttgcaaattctgtttctggtgacatagtgggctagaaatctggtttgttcattctattaaaaagcaattaaaaatactggtttgaatgtaaaacaattctgaaatgcttccacaagcacaaaagaaatcgaggacatttacatcagagaatgagtgaagatgaacctagagatgtgactgcaatggaaactgacttttaaaccttggtgctaagtggagtgggaggctggggcagcagttctggtatggaacccaaaaatctgcattaaaaaatactatcaggtttgtgaatagcagcattctgttgcatccatttctcagtaagtttcagaaattcaagagctggaaaaggtcaacctttaaaaataagttgtcttggctgggtgtggtggctcacgcctattatcccagcactttgggatgccaaggtgggtggatcacttgaggcaaggagttggagaccagcctggccaacatagcaaaaccccatctctactaaaaatacaaaaattagctgaccacagtggcacactcctgtactcccagctattcaggagactgaggcagagaattgcttgaacccaggaggtgaaggttgcagtgagccgagatcacaccactgctctccagtctaggcgacagagtgagaccgtcttaaaaaaaaaaaaaaggaaagaagaagaagaaaaaagctgtgttttggttctaaaatgattcaatggaaagatctaagaccagaatctagattccttgtttttatctagtaatttaagaaatacatttccttggtttccatagtgtggggctattgataaagatattttaacaaacatctgttaattttaaagtattaaaatattttttattgctttgagtaggcacaacatacatacagcacaaaattcaaatctataaatgaatataattgaaaattagattattttttcattctctggtcctagttcccttcccagaggcaatcattgctactagcgtcttaagttatccttccagagatgtttgagcatgtgtgtttgtgtgattctttttaaaaatctcacaaatggtagcatactaagttccctatttcttcatttatttaactctactatcttgaagagcattccacattgatacatatagatttgccttattcttggaaggttgcatatgattccattatacagatgtatcccaattgttctaatattttgatatttcagataatgctgcataaatatccttgtgcatatctttttcatatgtgtcaatagatgtatgaaataaattcctagaagtggaatttctgagttaaaggcatgtacacttgaaaatttaattttaatagtgccaaatcactctcaacagagctggcaccaatttttacttctaccagcaaagcacgaatgtttctttttctccttgttgcaaaaatatttcttttaattttgccttttgccatgtgaaattttaaaatttgtatgtatttgaattgatcaatttttaatagttacaatcttttgtataatacttaggaaggtcttccctaccctgagtctattaaaaaattatttcctatttctaatgctttatgttatgtttctgtttttacgtttaaaacttttatgtactaaaaatttattttggtatgaaggatatgacattaaaattttgtatagatggctgttgttgttcccaaaccatatactaactaatccatcttttcctccactggtgtgcaaagccacctttagtcatagactaaattccttagtatagttatgtctattgttagactttctattctgtttcattcagcaatttatcacccattcagtagtaccacactattctaattagtgaagcttcaaaataaaaataaaaatgataggcatagtcttctctttttattcatttttttattttttagagcttcccagccttatggctttttttttccttttaatatgcactttagatacagcttgctatttttctaacaaaaattatgttgatatttttattgggattacattacagttatagctttaaagagagaattgctgtcttcatgatgttgaatctttctaatcatgaacctaatattttggtccttttttttgttgttgcaattataaatgggggtttatcttcctttttatttttattttttgagacaggtgtcttgctctgttgcccaggctggagtgcagtggcgtgattgcagcttgctctaacctctgcctcttgggcttaagcgatcctcccacctcaatctcctgagaagctggggctaaaggtgcatgccactatgcccagttaatttttgtattattattattattattattttggtagagacggggtttcgccatgaactcctgggcttgagggatccgcctgccttggtctcccaaagttctgggattacaggtgtgagccacagtgcccagccttcctttggatttttaaactggttgttgattgtattaatacatatgaaggcaattaatgtttgtatattaactttgtaaccagtcacattgctgaattcttttaattgcaatttttttccctttaagtttaacaactgatagatcatctacacattatgaagtttatctcttcctttgctatttttatacctaatttcttttattgaccagtttcattggctactatcttttccagagcaatgttagataataatggtgagagcggtcatctttgagctaacacatttaaatttttgtaaagtaatcaaaaaggctataaaatatgcttccttaaaaccaccctggagaatatgtttttagaaaggaaatgaagtcaaaatgctttctgcaagggtgcctcatatgtttgattctttcaagtattctgttcaaatgtaccttttcagtgagaccttcccagaccacctatttaaaagtgcacaacccccacctctccacctattctggttgatttttctctgtagcatttatcaccacttcacaaactatatttcacatatttatttttataatgtatgtttccctccactggaatgtaagctctactagtgtaaggaattttaccccctttttggtactgctgtctctccagcacctagaacagtacctgcacataaaaaaaatgctgtataaatacttgatggatggaatttcctaagaaaatccagaaaaggccgggtgcggtggcttacacctttaaaatcccagcattttgaaaggctgaggcgggttgaccacttgagctcaggagttcaagatcagcctgggcaatatggcgaaaacctgtctctacaaaaaaatacaaaaattaatttggtgtgatggtgtgtgcctgtagtcccagctacttgggaggctgaggtggaaagaccacttgagcccgggagagccagatgctgtctcaagaaaaagaaaaaaaaaatccaggaaaggtgctactataagagagatttgcttacctctagttagatgtcagtatagaatagggattaattacctgaaaaacttgatggaactttaaaaagtttagtgacatcatttatttctgtcactctgtttctccatagtgataaataataaatgagaatcttcaaatcccagtgagtctgggaagataagaatccaggtgttgagagctgtaaagaggagaataggctgagacttgaggctgcaccagcaagagttcccatatagctccctgactggcatctattttaaagaaaaatttttcatctgttttgcagaaatgaccattaaagtattttactagaaatataattcaccaggagaaattgagttccacaaaacaaacttcattgttgttcaaaacagatgttcctttctttgtacttaactcaccattaaaattaaacacagcaaggtctttcaaaaaagcagtgagaaactttaaaggagttatgtctaggacgtagccatgattattaagaaaaagaaaggaaggaaaggagggaggaggaaggaaagaggaaaggaagaaaggagaaaaaggagaagagaaaggaaggaagaaggggaggaaggaagaagggagggaaagagggaagggagcaagcaaaaagaaaaatgaaggaagaaaataaaggttatgagatttaaacaaagtagtttgtgcaactgtgtgcaaattctgtcggcaaattgtcctggtggcctcagtgtgggaaaatgagttgctcagcagggactgctaaaaatacagcaaccaggaagacgaaatgacttcacgctggcacatttgcctggctagtgcttgatcgttgtttgttctgacttctacttctggtacagtgtcagtgcctctccttaaactttgttcattagagtaaaaggattagcttgaacctggaggacatataacaaggcttaattcagaagccaaaattggggatctctagctcagagacgctcttcacatttgcgctattattagcaccaggattaggctgaatttagactagcattcttattgcacctgatgggaaaataggaggttactgcatttagactgaaggaaatcacgaatgtcagcctactattaacaatgttttagataaaaatcgcaagaatctatgttaggatcttaaagtggatttcaaagcagtgtgttgttcatccggactagtctcttccttccttgctattgtgatttctattaatgtatttctttcttaccttccatttcatcccagatggacataagggactgtctttttcagtgaggcaaaggaaatgcaatcctattttttgtctctcatttcaatcagagaaaaaacaaaagcccttgccatgctctgtaaggtacttcgtgatctccagcttcacttctcacccccttccttcttgctcacttcacatcagccacactggcttctgctgttccttgaacatgccaaacccactgttgtcccaggaactttgcccttgctgttcacgctgcctggggtgtttccgccagctctctccatggctcactccagctcttccttcaggtctccgctcaaatgtcttggctgactacccaatctgaaatagcaatcacggccgggcgcggtggctcacgcctgtaatcccagcattttgggaggccgaggtgggcagatcacaaggtcaggagttcaacatctgatcaacatggtgaaaccccgtccccactaaaaatacaaaaattagccaggcatggtggtgggcgcctgtagtcccagctactcgggaggctgaggcaggagaattgcttgaacctgggaggaggttgcagtgagccaagattgccattgcactccagcctggcgacagagcgagactccatctctaaataaataaataaataaataaataaataaataaataaataaataaatagcaatcccgtcaacctgcccctgtttccccttacctatcttaccctacttcatgtttgcttattgtttttatcacaacctaacaaattatatttttgtttatttatttattgtctttcttcctcagctacagtgtaaactccactgaggacaaaacgaattcctcagtgcttagaatgtgttcttagtcccgagaatgttatctggaaaatgaagcagatgcttgaagaatattgttgaatgaataaaagaatctacttttgtctgtaatcccagcattttgtgaggctgagctgggcggatcaacggaggccagaagttcaagaccagcctggccaacatagtgaaaccctgtctcgactaaaaataccaaaaaattagctggcatggtggcacatgcctataatcccagctactcaggaggctgaggcaggagaatcacttaaacccgggaggaggaggttgcagtgagccaagattgcatcattgcactccagcctggacaatgaagccagactctgtctttaaaaaaaaaaaaagtatcaactttaatcctgggcactttaatgtgaaggtttgtttctttgggttttctgcaatgtgcttaactcttctgtggcagttgggaatgtatttctcatttaacattaaaagccatctatttttgcaaaatgttttataaatatgaactttaaaaaataaggccaggcacagtggctgacacctgtaatcccagcactttggaaggttgaagcgggcagattgtttgagtgcaggagtttgagaccagctggggcaacatggcaaaaccacatttttacaaaaaatacaaaaattagcctggcatgatggagagggctgtagtcccagcttcttgggaggctgagacaggagaattgcctgagcctgggaggcagaggttgcagtgagttatgattgcatcactgcactctagcatgggcaaaagtgagaccctgtctcaaaaaaaaatacatatacatatatatgtgtaaaaacacatatacatatatgtaaaaatacatatacatatacataatatataatatatacataaatatatatatataaaataaaatatgtaaggaggttatgtttgaagttgattaattagtggtcctggatttttagagtatgtacttttttttttttttgagacggagtctcgctctgtcacccaggctggagtgcagtggcgagatctcagctgactacaacctctgcctcctgggttcaagtaattctcctgcctcagcctcccgagtagctgggattacaggtgcccacccccatgctcggctaatttttgtatttttagtagagacagggtttcaccatgttggccaggctggtctcgaacccctgacctcaggggatccctcccaccttggcctctcaaggtgctgggattacaggcatgagccatcttgcccagccctgagtatgtacttttaatattggtttctatctcgttctacctatcacactctgtgttaggtagacaaagataaagacccaaagaagatatttattcaattaatcattatccaggctaatggaccagctacttgctatacccattttgcctgtgtttgtttttatattttccatgtgttagagacaatcaatattttggctgagaaagtttggctacaggctatctatgatgaaaaaagtaaataagaaataatgagcattgtagcagacggttttgttttctattctgcttaatgatgcctaagaatttgaaagcaagatttgctatggatcaccctatttctatttctcctcctactgcactcccctagttccttccaacaaaaatacacttttaagcattttcccatacattaacaggcaaaagaatgtctatctagcaaatatacctaatggctaaatatacattttttagaaaaatcaatgaaaacatatttatttaatcaagtgtgagtctcaggaaaatatatgtacagatagggtaggtcttcttttcatcccattacttgcaaaaaatcttgataagataggattctagaaactattaaaaaatatattctgtgtaaaaaagatagcaggagaaaagaattggatgcaggagtactatggtctcataaagggattcttgaggttaaccaacacattgtgggccctcaaaatgcatcaaaccatctttgaatgtacaattagcattcattcattcattcattcattatttatttatttgccagacattagccaaatgcccactagatgacagatttttttttccatgtaagaatccaaagttgaataacagagccccactcttaagtagtacatagcctttttaggaagacacatgtacatcaattagtaagtgtaatgagttgcttagaagtctatgcaaggtgtagggggaagtggtagagtttgttctgagaagagaattatcaattcaagcaggctggagtttgggaggagcatggggcattagaatcttggaaaggcttaagtaaaatatcttgcacagactaagtaagagttagaatgattttaaaaaaattgattagtgcaacaaaagaaaaaataaacacattgagtatcaaattttaagatgtttgtgcttcaatctgggggcacactgaggccttcttcgctcagctcatactcattctagctcccgtagaaccccatctgagtgctaggaagggctcggtcgtaaaacgataaggagatattttcatgaaaatctctggcacattaggagaataaagcattgctgctttgggatttgtataacaggtgttttttattgtttgtttgttttttttttgagacagagtctcactctgttgcccaggttggagtgcaatggcatgatctctgctcactgcaacctctgcctccttgattcaagcgattctcctgcctcagcctcccaagtagccaggattacaggcatgcatcaccatgcctggttaatttttgtatttttagtagagatggggtttcactatgttggtcagactagtctcaaactcctgacctcaagtgatctgcccacctcagcctcccaaattgctgggattacaggcgtgaaccaccacacccagccttgtataacagtttaacattgaggtcatgaatagttattccctgctttggtgaaattgtgacatgcctctgggtgcttctctggccaggctgtgatcatcattacccatgagacacctcctaggaaggagagagggtgtttggggtctggtaatggccaggcattcctatcgcaagcccgaggcaggtgaaacatgggacacatatacagcagtgtgaaggcatctgtagctgtagaaggaacacatccttttgtgctttgaattttaggcctgctgtttcattcaaaatcctagtcagaatgatctccaagtatcatcaaaccttcaagtactatgatgacaggattcaaatttcaccaaaaagaagtgctgtgggcctggtgcagtagctaatgcctataatcccagcactttgggaggctgaggcaggaggattacttaagctcagaagtttgacaacagcctgggcaacatagcaagaccctatctctctaaaaatacaaaaaattagctgggcgtggtggcacacacctgtagtcccagctactcgggaggctgtggtgggaggatcacttgagcctgggaggtcaaggctgcagtgagcagtggctgtgccactgcattctaggctaggtgatagaatgaaactctgtctcaaaaaaaaaaaaagatgtaaagaaaatgctatgatttgctgatagaggccaggctgccagcaagtcatcatatgtcactgtctggagacagactcccctgtgagtgcggtttaagtgtatgctgaaagcagtacgaaggtatgaagtataaggactcttggggctgtgtcccccacaacagagaaatgcgggcaagcagttctcctgcccgtgtgctgccagcaacacccctctctggagggattaatatattgatcagcctctggagggtggtgacctctccagtggaagaagtctggctaatcccttagtttctctgacagcaggtctgaaaggatcctgttgccaggaatcgaaggcagttgttaccttgacagcaggagtgcagcatgcaagcatctctcctggtccccatgtgatctgtcactgcgacgctatgtgtttatacctgtgcaagactccggaaggtagagactacccacgagtgtcccatatgccctctcctggagtcagggctgggtctactggggtcagcgtgcactctctctttgctgttctcctagatgtcaactgatgggaccccttaagccagaggcagatctctcagggaagaaggcatgattcctgatatgggcaaagtgctgggtaagtaagagtgcctgcgctttcaataaaccaattggctaaaattcttctcaacatagggcacatgtaaaaggatgagtgttttcccttccaagtggccataaatgttgctggacaattttcagcatcacatcagaatggtctcaggtgttttccccatccctgcctttctcactttgattatttttgtctttcttcatatattcaaatactttgtaaactaaggattgcttgtgctaatgggctcgttagtgttctggggtgagttgtgagcacttttagacttgaggctaactctggtgactgttactgcccagctcctcctcatttcacctgggtttgtaagcccactagtccctgctttaggtatgctgtaacctcatcttttatagtttcattctgtagactaaaattctagctattacatagagttccatttaaaacaggctcaggtattcctgtttatgattgttggtaaatgaagatattcttatcacaaaatacataagtggaaatatttaatcagctgcagtttcttcctccacatatccccctgcttccttcctttactaaaactcctcttggattctgtatctcagagggaggcaaaaccatcaggaagaaaaatctaattcaaacttgtgttttattttattatatatttttcctctgaagcacaaagtgtttcataaacatgccattttttcacagcagcaagttactgtgacttgaacatctctgcctttcccaccctgagagtacaaaagcattcacatcttaatggctctgcatcttagctacccattatggttctttgtggaagttcctttcctctgtatatttgtggaaattcccccacaaattgtttttcatttattcatgcagagcctgggcttagagctcaccactgagattcccaaactgggttgccacagatgccaaaactggaactctgctgttgctaatgcagccagctgcagatcccaatgaaaactgtgatgctgtcacactggtctcactgcagctgtgctggtgctggtactccacacccccaccatggctgctttggagtagctcttatctcaggtacctcagccagtgatgcttttgcaaagtgagaaaaaggatgtttccttgctctacgttacagtgataacaaagggttctagaacagggttggttagccctaaagcacaatgagttagatcccagagtgctttattctgaattgagctgcactggtcttgctgcagccagaactaccatttggaactgatctagttggaactctgatgttgcatctgtcttcgaacccgggaatctaggactttgctaccaccggctccttctcatttgggattcctgctaatatcttggccaattctgtttttgaaaataaaaatagaatgtttgtttctttgcttttgggagtggtgggaaggcttgtgccccaaagtttcaggttgtgagacagctgttaattcatacacacagggctcaaacatatggctggaatgcctgggtccccagtgtctgtgctattagctgctaaattcactgcctttcaacccttaggttcttttgctaaatgtactatccaaataccttgctccctttggtaaattttctgttgtctctctttatatcttacttattttgcttcctccacttaattagttgtatatatgttaaacctattttgggtcaagatttaattattttcccaggagcgtctgtagtatctagcaattcagtttattccgatagattctgtactatagggatgaaggggatgagttctcttattctgcttaacttggatgtatctgagtctcagctccaacctagccgaagcactctgcatttgcagccagttatatagttcaagtttcaaacacgttatttgcaaataactgtcccccccaccactatagaacactctatcctctcaccatcttccttgtcttcctactctcaacttaaccattactttgacgtcttccccctcccttgcctgcctgctagaacagccaccaaattgctgcatgttcttggtgtttatcattggttggtgcagggaactcttccatcagtgtctttccaatggtcttctctttcctcaggagaagagtatctatttatctatataaaacaatcagaaaattatgttgagagaaactatttcaaacattggggaaacaatagagattaatataacaataccatgtagccaccacttacatttagtaaatgttaacattttcccattttgcttcagattttttgaaatcaatacattacagatacagtgacagtgtgtgtatgtaactccctgagtcatctatttacttctccctagcccataactccctaggtcctctagaaataatcattcattcctgaagtaaggatttttttcttcccataattttcttttttttttttttgttggagacagagtctagctctgtcacccagactggagtgcagtcacaggatcgcggctcactgtaacctccgcctcccaggcttaaggagttcttgtgcctcagcctcccaagtagctgggattacaggcgcatgccaccatgcccagataatttttgtattttagtagagacggggcttcaccatgttggccaggttggtcttcaactcttgacctcaggtgatccacctgcctcggcctcccaaagtgctgggattgcaggcgtgagccaccatgctcagcccccataaatgttttaatacattttatataagtgcatatgcccaaataattatttaatattattttatgggtttaaaatttaaatgtatgatagcattcagtgcatcacattttccaacttgttttttttttcatttaaacttaagttttttagttttttttccatgttcatacattagatgtaattcattcatttaaactactgtagagattatatttgagactctactcatttctcaattgatggggccaatagctactttaaattcccttttttcctactcttccaactcttgccttattacctctgaaaaatttcattactccttcctgattctgattattaaggtaaaacagaagctgtcttaccttatttgtctccaatgttgaatgaaataaactgatacctgaagtgacagacagggcagctaaaggacaagaacagactccaaagttatgagccctgaaacgatgacctgaagatgctctaagggttgatatgaggttggtggagatgctgtgcctgggacagcaagagcatggggctctggggtaagacaatccatgcttgaattccagcttcactccgttctagttgcttgaatttttctctaaacattttaatccccgccccccgcccccaccagtctcaaagtcctaatggatagtttatggagttgttttgagggttaaatgaaataattcatatagaacttgtagtgcattgcctggcacatggtaagcattctgctcatctttgttatggttattcgcttagctgaatgcagacacttctattttggtagtgggatctatgtaagatctacttctgcctcttggctggagctgtctctctctctctctctctctgtctctgtgtgtgtgcatttatgtgtgttcaaaaagggatgaggagggactagctacaaagctcttataaccatgagcttatatggaagaccatctcactcctgcttcaaaggcaagatggactttttgatgtgttgaggattcgatattaattcaagggaattgttcaatatcttaacatcttctaagagcattattaataatcggatgtaaagatcgccttgaagtatagtctataataataacttgaattatttcactacattaaacacaattttaaatggtcttttcatatgtatgtttcaacttatctgcaacctccacgaacctattcaactcccatttaaacccacaccaaatgacagttttttaaattgtattttattttcttttttattatactttaagttttagggtacatgggcacaatgtgcaggttagttacatatgtatacatgtgccatgttggtgtgctgcacccattaactcgtcatttaacattaggtatatctcctaatgctatccctcccccctgcccccactgcacaacaggccccggtgtgtgatgttccccttcctgtgtccatgtgttctcattgttcaattcccacctctgagtaagaacatgcggtgtttggttttttgtccttgcgatagtttgctgagaatgatggtttccagcttcatccatgtccctacaaaggacacgaactcacctttttttatggctgcgtagtattccatggtgtatatgtgccacattttcttaatccagtctactattgatggacatttgggttggttccaagtctttgctattgtgaatagtgccacaataaacatacctgtgcatgtgtctctctagcagcatgatttataatcctttgggtatatacccagtaatgggattgctaggtcaaatggcattgcttgctatagatccctgaggaatcgccacactaacttccacaatggttgaactagtttacagtcccaccaacagtgtaaaagtgttcccatttctccacatcctctccagcacctgttgtttcctgactttttaatgattgccattctaactggtgtgagatggtatctcattgtggttttgatttgcatttctctgttggccagtgaagatgagcattttttcatgtgtcttttggctgcataaatgtcttcttttgaaaagtgtctgttcatatccttcgcccactttttgatgggtttgtttgtttttttcttgtaaatttgtttgagttcattgtagattctggatattagccctttgtcagatgagtgggttgcaaaaattttctcccattctgtaggttgcctgttcactctgatggtagtttcttttgctgtgcagaagctcttgagtttaattagatcccatttgtcaatgttggcttttgttgccattgcttttggtgttttagtcatgaagtccttgcccatgcctatgtactgaatggtattgcctaggttttcttctagggtttttatggttttaggtctgacatttaagtctttaatccaacttgaattaatttttgtataaggggtaaggaagggatctagtttcagctttctacatatggctagccagtttttccagcaccatttattaaatagggaatcctttccccattgcttgtttttgtcaggtttgtcaaagatcagatagttgtagatttgcggcattatttctgagggctctgttctgttccattggtctatatctgttttggtaccaataccatgctgttttggttactgtagccttgtagtatagttcaaagtcaggtagcgtgatgcctccagctttgttcttttagcttaggattgacttggcaatgtgggctcttttttggttccatatgaactttaaagtagttttttccaattctgtgaagaaagtctttggtagcttgatggggatggcattgaatctataaatgaccttgggcagtatggccattttcacgatattgattcttcctacccatgagcatagaatgttcttccatttgtttgtatcctcttttatttccttgagcagtggtttgtagttctccttgaagaggtccttcacgtcccttgtaagttggattcctaggtattttattctctttgaagcaattgtgaatgggagttcactcatgatttggctctctgtttgtctgttattggtgtataagaatgcttgtgatttttgcatattgattttgtatcctgagactttgctgaagttgcttatcagcttaaggagattttgggctaagacgatggggttttctagaaatacaatcatgtcatctgcaaacagggacaatttgacttcctcttttcctaattgaataccctttatttctttctcctgcctgattgccctggccagaacttccaacactatgttgaataggagtggtgagagaggtcatccgtgtcttgtgccagttttcaaagggaatgtttccagtttttgcccattcagtgtgatattggctgtgggtttatcatagatagctcttattattttgagatatgtcccatcaatacctaatttattgagagtttttagcatgaagggttgttgaattttgtcaaaggcattttctgcatctattgagataatcgtatggtttttgtctttggttctgtttatatgctggattatgtttattgatttgcatatgttgaaccagccttgcatcccagggataaagcccacttgatcgtggtagataagcttcttgatgggctgctggattcggtttgccagtattttattgaggatttttgcatcgatgttcatcagggatattggtctaaaattctctttttttgttgtgtctctgccaggctttggtatcaggatggtgctggcctcacaaaatgagttagggaggattccctctttttctattgattggaatagtttcagaaggaatggtaccagctccttcttgtacctctggtagaattcggctgcgaatccatctggtcctggactttttttggttggtaagctattaattagtgcctcaatatcagagcctgttattgttcttttcagagattcaacttcttcctggtttagtcttgggagggtgtatgtatcgaggaatgtatccatttcttctagattttctagtttatttgcatagaggtgtttacagtattctctgatggtagtttgtatttctgtgggatcagtggtgatatcccctttatcatttttttttgcatctatttgagtcttctctcttttttctttattagtcttgctagcagtctatcaattttgttgatcttttcaaaaaaccagctcctggattcattgattttttgaagggttttttgtgtctctatctccttcagttctgctctgatcttagttatttcttgccttctgctagctttggaatgtgtttactcttgcttctctagttcttttatttgtgatgttagggtgtcaattttagatctttcctgctttctctagtgggcatttagtgctataaatttccccctacacactgctttgaatgtgtcccagagattctggtatgttgtgtctttgttctcattggtttcaaagaacatctttatttctgccttcattttgttatgtacccagtagtcattcaggagcaggttgttcagtttccatgtagttgagcggttttgagcaagtttcttaatcctgagttctagttcgattgcactgtggtctgagagactgtttgttataatttctactcttttacatttgctgaggagtgctttacttccaactatgtggtcagttttggaataggtgtggtgtggtgctgagaagaatgtatattctgttgatttggggtggagagttctgtagatgtctattaggtctgcttggtgcagagctgagttcaattcctggatatccttgttaactttctgtctcattcatctgtctaatgttgacagtggggtgttaaaatctcccattattattgtgtgggagtctaagtctctttgtaggtctctaaggacttgctttatgaatctgggttctcctgtattgggtgcatatatatttaggatagttagcttttcttgttgaattgatccctttaccattatgtaatgaccttctttgtctcttttgatctttgatggcttaaagtctgttttatcagagactcggattgcaatacctgcctttttttttttccatttgcttggtagatcttcctccatccctttattttgagcctatgtgtgtctctgcacctgaggtgggtttcctgaatatagcacactgatgggtcttgactctttatccaatttgccagtctgtgtcttttaattggagcatttagcccatttacatttaaggttaatattgttatgtgtgaattggatcctgtcatcatgatgttagctggttattttgctcgttagttgatgcagtttcttcctagccttaatggtctttacaatttggcatgtttttgcagtggctggtaccagttgttcctttccatgtttagtgcttccttcaggagctctttttgggcagacttggtggtgacaaaatctctcagtatttgcttgtctgtaaaggattttatttctccttcacttatgaagcttagtttggctggatatgaaattctggggtgaaaattcttttctttaagaatgttgaatattggcccccactctcttctggcttgtgaagtttctgccgagagatcagctgttagtctgatgggctttcctttgtgggtaacccgacctttctctctggctgcccttaacattttttccttcatttcaactttggtgaatctgacaattatgtggcttggagttgctcttcttgaggagtatctttgtggcattctttgtatttcctgaatttgaatgttgacctgccttgctagattggggaagttctcatagacaatatcctgcagaatgttttccaacttggttccattctgtctgtcactttcggtacaccagtcagaggtagatttggtcttttcacatagtcccatatttcttggaggctttcttcatttccttttattcttttttctctaaacttctcacttcatttcattcatttgatcttgcatcactgataccctttcttccaggtgatcgatcggctactgagggttgtgcattcgtcacatagttttgtgccatggttttcagctccatcaggtcctttaaagacttctctgcattggttattctagttggccatttgtctaattttttttcaaggtttttaacttctttgccatgggttcgaacttcctcctttagcttggtgtagtttgattgtctgaagccttcttctctcaactcgtcaaagtcattctctgtccagctttgttccattgctggtgaggagctgtgttcctttggaggaggagaggcgctctgatttttagagtttccagtttttctgctctgttttttccccatctttgtggttttatctacctttggtctttgatgatggtgacgtacagatggtgttttggcgtggatgtcctttctgtttgttagttttccttctaacagtcaggaccctcaggtgcaggtcttttggagtttgctggaggtccaatacagaccctgtttgcctaggtatctgcagcggaggctgcagaacagtggatattggtgaagagcaaatgttgctgcctgatcgttcgtctggaaattttgtctcagaggagtacccggccatgtgaggtgtcagtctgcccctactggggggtgctcccaattaggctactcaggggtcaggaacccacttgaggaggcagtttgtctgttctcagatctccagctgtgtgctgggagaaccactactctcttcaaagctgtcagaaaagggcatttaagtctgcagagaattctgttgccttttgtttggctatgccctgcccccagaggtggagtctacagaggcaggcaggcctcctggagctgtggtgggctccacccagttcgagcttcctcgccagtttgtttacctactcaagccttagcaatggcgggcgccactcccccagcctcgctgccaccttgcagtttgatctcagactgctgtgctagcaatgagcgaggctccgtgggtgtaggaccctctgggccaggtgtgggatataatctcctggtgtgccatttgctaagaccattggaaaagtgcagtattagggtgggagtgacccaattttccaggtgtcatctgtcacccctttctttgactaggaaagggaattccctgaccccttgtgcttcccaggtgaggcaatgcctcaccctgcttcggctcatgctcggtgcactgcacccactgtcctgcacccactttctgacactccccagtgagatgaacctggtacctcggttggaaatgcagaaatcacccgtcttctgcatcgttcatgctgggtaacagtttttattaagaaataaaaatgtatgtgttaagataaagggagtgagaggctatcagtttgggaaggggagactttgtggcctgcaagattttagtgactccatcttcattcttagaaaaactgttttgtattactgctctttgtaggcatgcagccaaaatacacggatgcaattgaaagaaacaagggttgttctttgctgggaaaaatgctaaaggtagaatgggaacctcttcagagtgactttttcttccgaaattattgtgaaacaattagtcagagttgttcagagaaaggctgtttcaaatggctctactaagacaaaacagtaactgtgatgattgtagccagggatgcagaaggaagttgggccaaataagggtactgaatacaaggagaattcacacagaaggtcgttcatgttgaggacatttttgtttgtttgtttttcttttcttttttttgaaacagtcttcccctgtggcccagtctggagtgcagtggtacaatctcagctgcctgtaacctctgcctcctgagttcaagtgattctcctgcctcagcctcctgagtagctgagattacagttgcgcaccaccatactcagcttatttttgtatttttagtagagatgaggtttcaccatgttggccaggctggtcttgaactcctggcctcaggtgatccacccaccttggcctttcaaagcattgggtttacaggcgtgagccactgtgcctggccttgaaatttttttttttttttttgagccggagtcttgctttgttgcccgggctggagtgcagtggcatgatcttggctcactgcaagctccgcattccgggttcacgccattctcctgcctcaacctcccgagtagctgggactacaggcacccgccaccacgcttggctaatttttttgtatttttagtagagacgaggtttcactgtgttagccatggtggtctcgatctcctgacctcatgatctgcttgtctcggcctcccaaagtgctgggattacaggcgtgagccactgcacccggcctggccaggaaatatttttagattaatcctgtggatgaactgaggaggtggtattggttaagtccaaaattctcgggtagccagcaatgggtcatagtctactcacaatcagcgtttctatggacattctgaaaatttaacttctttcacagggacagaaaataaagagatcccatctttgggaaatactacatgtccctattaggatctggctcctaagactagttttgtactcattttgcaaaactgcatgtattctgcaaagccgtctctctcccaaatataacagtatctgtaataacaacaaaacatttttaaaaactgcgtttgttcttttttactgcattttttcctgcatattaaatctttgagaactgtgttggaactatattgccttacggagtagtaacattctatgtaagccaagagtggcatgcagtaataaaatgtagtggccatcttcaagggagttttatcctttgtggtatcaagtaccagactctgtgttaccagactagtaacacatagagttactactcatagttactactcagtaagtatgtaactcagtaaggcaatataaagatgacttttattaagggatgcaagataatgtaaacatgtaaacaggaactggcaaactgttcagtaaggatcactggactgcaatttctattctaaagctcattttaagtagaagcttctcttaacttagagaagtaaaattcatatggttgatggatttcaatagatttctctctttttatatttcactaggattctatttttcctacattttcttatacaaactttttcatgttgacagatattttaaaaatgaatattgatatttacatattccaaaccctagtaagaattagtagataaatttatagaagttcataaggagatatttgtcgagacagtttcctatacattttctaggaagaaatatttgattttaagtattttgggggttactgggaatttgcacgtcatgttacatcagaaaaaacactgcaaaaacctaaaaacagaatgctgagaatagaacctgaaaggagggcaagaagaagagattcttacatgggtttaggtaatttgaggtatcatactatcactaagagtttttgtattatttgagatacatcaagtaattgttatttttctttttacagatacccataattgtgttgtaacttcttctggctataaacctgagcactgatgcttgacctattgtaagtaagaaagtcatatatgggccgggtacagtggctcacgcctgtaatcccagcactttgggaggccgaggctggcagatcacaaggtcaagagatcacgaccaccctggccaacatggtgaaaccccatctctactaaaaatacaaaaattagctgggcgtggtggcgtgcgcctgtagtcccagctactcgggaggctgaggcaggagaatcacttgaactcaggaggcggaggttgcagtgaaccgagatcacgccactgcactccagcctgggtaacagagtgagactttgtctcaaaaataaaaataaaataaagtcatatatggcaaaaaccagtcttgtattttgacctcttttgttttttcttttctttttttcctttttcttgagacagagtcttgctctatcaccaggctggagtgcactggcgtcatcttggctcactgcaatctctacctcccaggttcaagcaattctcctgcctcagcctcccgagtagctgggactacaggcatgcaccaccattcccagctaatttttgtattttcagtagagacagggtttcaccatgttggccaggctggtcttgaactcctgacctcaagtgatctgcctgtctcggcttctcaaagtgcggggattacaggcgtgagccactgcattggcctatttttacctcctttctgtctttactttaagaaaaaaagatttaaatcataaatagttagggatagaaaaacctttttgttctgtaagtgaatatcctgacttgttttgaattgataaactgcctaagtttagcttcagcaatttaaactcccagagttcttcttgtgatactggtgggtactcaataaatgattgctattgttgttgttggtaaaataggtgaaaaatgagcgtggagatgcattttccccctttgtgtcttgatattaaagtttttcttttcaaaccattatagggacctacctatttgttggtcttacaatggtgggtcattttgcatcctattataatttgctccaaataaaatagtttttatcttcaaatagaaacaaactggagagaagtaatgagacaccatttgggattgttggcaactttaaatgttcgaaaaatgaagtcacaaaagcaggagaacaaaaagcctcaccctggctgatgagattatttaaccagcagttggtgttggcaccagattatcagccagactgttaaaaaaaaaagtgctaggggctggtaaccctgtcctctgtgggaaaaaaatctaaaatatgtcccttattaaacattttggtacacagatttcccttatgaatttctgattagaagaaaatatgaggatatggcatggtaagccacgagtggcatacagtcataaaatgtagtggtcatcttcaagggagttttatcttttgacaatatcaagttttgtttcatcagggtgtcttgtcctgcctggttcaaatcacctatggctcacatattgatgatcagagagagagagattccagggaaaatgtattggaaaagtacttctaagagcttctccagagtagagtggcatgtacagatccttttccaaatactaagcactgtgtgtctatttttggcattacattataaataggcctcctgcttattgtgatacaggaaaaatactttcaaggagatttacattcagctctaccatgttgtaatatttaaggctgcagtacttttataggtaatgctaatttgctggtgaggtttattagctttgtgagtctcagctggtagatgtaaggatatgtagttaggggaagctctaggattttctttgacaaatcccaatatgttaacaggaaatattagccacatgcagtatggctaataaagttctctattccttgttttttaaaaaatataccatttcacacttttgggggattaccagaagctggatgttttgtgttaaagtatgtgtgtggttcacgagtcctcatttttccaggacaagaaaggtctctctgtcttctcctgcagtcttcagtgaagcttcagagccaagctctatattttccagggggagtctgttgatttttgttatatatatacacatcagttttcaatgaacaggctaaaagttaggcattaattaattaggtgtacttttttaacttatggaattagacttctttcaaattgttgatcagtaaaactgatgatcagtaaaaccatatgtgttagttttaaacactatacaacaggagcatactgtttaatcagcataatcttttcagagagcactatgttgaaaaaggattctaaacttttcatggtaagcatttgggatttggaaaacttgaatctctttccctacttctacgtgaagccattctctaccactctttggtgaaatgcagtacctagaaaactgtaagtaaaaccctatatcctggaaaagatcaatggggagagcatttgatcacataagagcagagatgagtttcaggagggaggctaaaggacagatggccctgcagggtctgccaagatgttcagaggccccaggacagccaagacaacaaatggactgtgctctcccttttatatggacagcaccagggtggggagttctgattatttagcaaaagagtttgctccaggattaagaaaatgtaggactttctaattagctgcttcctgacaatgggtgggctttgtgatctttgcatctgctgcgttttgctcatttgctcaactgcgcattgcctgcataggttctgtttagatggtgtttgatttttgctgacttccctccctccctcctataattattaatacttcttcagtgactgataaggtctaggtactatgttagggctggatatatataatagtgaacaagaagggtatggctcctactgtcatagagcttatggcctagtatggaaaatgaaaatgaaactagttataataatgtataatgagggctataaaagagaaattgcagagttctgtaggtatacataggaggggaacctaagataatctgaaggtcagagaaagtctctctggaagggatatgtagtctgagacctgaaggatgagtagaagtttgcttataaaataaagattccagatagagaagacagcatgtatgaaagtgagagagatttttacacatttgagcaattggagggtaaagtggagagaagggtaaaatggaaggcctggaggatttttgtctccttttctcccttcctgcactctaggatataggcaggcatgaggaaggccgggagagggttttggtgggacagtttaaattttggcaggaggaagtacttcactgggaggtgggaagtatgcctctggaaatgcatcataggaacaaggattgactgactcacaaaggtagaaaataaggttagtttagggttaaattctctgcatagggtggctggaggctaaaggggggaggaagcaatttgggaatcaatagaatacagtagtagctagggtaacccagacggtatgtatagagaaaggagagaagacccaaaacagaacactgaaaaacactgacatttagttgacaggcagagaagcactgcaaagaagatgagaaggacagttcagaaaaagacggtgaatcgcagaagtgaaaggagagaatttttcaggactggggcttgcctcgggcacaaaatttaaaaaggtgccaaaaaactcagtaattgagataaatgttattttaatgcaatatttaaaaaaatcgttagtgcaaaaaatccatgatgaacaaaacatcacattttaaataaaaatgggatccgaattactgaattttctttttgctgcgagttccaatatggctgacaggacactgtggaatttatatttagaagtcttatttttctaagtttgatattttgttcatctagaaagaaggaacaatgaataatgttaagtgtggctgagaagtcagtcaagataaggactgaaatgagtccactggatttagggacaaggcattgtcgttggatcttttgtctaccttgttttaataaattgcaatggaaatcatcttactgtctctgcgaacataatcatcacctccaaaaaagctgagttcttttatgaattagtggattgtataactataaacttacatttttgttcacatttttattgtgacaaaatacatataacataaaatttgccatcttaacctttttgtttgtttgttttaggtttaggggtacatttacaggtttgctatataggccaactcatgtcatgggggttttttgtacagattatttcatcacccaggtacgaggcctagaacccaatagttactttttgtgttcctctccctcctcccatcatccacccttaagtaggtcccagtgtctgttgtttccctctttgtgttcatgagtgctcctcatttagctcccagttacaagtgaggacacgtggtatttggtgtttttgttcctgggttagtttgccaatgataatggcctccagatccacccatgttcccacaaaagacatgatctcgttcttttctgttgctgcatagtattccatggtgtatatataccacattttctttacccatctgtcactgatgtgcatttaggttgattctatgtctttgctattgtgaatagtgctgcaataaacatttgcatgtgtgtgtctttatggtagaataatttatatttctctgggtatatacccattgatgagattgctgggttgaatggtagttctgtttttagctttttaaggaatcaccacactgctttccacaatggttgaactaatttacactcccactaacagtgtataagtgttcccttttctccgcaatttcatcagcgtctgttatttttttgactttttaataataaccattctgattggtgtaaggtggtatttcattgtggttttggtttgcatttttctaacaattagtgacatagagctttttttcataggattgttggcgacatgcatgtcttcttttgaggtctctgttcatgtcctttgcccactttttcatgggattgaagtttttctcgtatatttgtttctttcttgtagatgctggatattagacctttgtcagatgcatagtttgcaaatattttctcccactctgtaggttgtttgtttactctgttgatagtttatagtttcttttgctgtgcagaagctcgtgtttaattggatcacatttgtcaatttgtgcttttgttgtgatggcttctggcatctttgtcatgaagtatttgcctgttcctatgtccagaatggtattacctaggttgtcttccagagtttttatagttttgtgttttacatttaagtttttaattcatcctgagttgatttttgtgtatggtgtaaggaaagggtccagtttcaatcttctacatatggctagccagttatcccagcaccattttattaaataggtagccctttccccgttgcttgcttttgtcagatttgttgaagatcaaatgatcataggtgtgtggtcttatttctaggctgtctattctgttccatcagtctacatgtctgtttttgtgtcagtaccatgctgttttggttactgtagacttgtagtgtagtttgaagtcaggtagcatgatgcctccagctttgttctttttgcttaggattgccttggctattcagattcttttttggtttcatgtgaattttaaaatagttttttccacaaaaagaaactggcataataaccagctaacaatacaatgatggaataaaatcacatacaccaatactaaccttgaatatgaacgcattaaatgtcccacttaaattgtgcatagtggcaagctagataaaaagcaagacccaatggtgggttgtcttcaagaggcccattccacatgtaatgacaactataggttcaaaataaagggatggaggaaaatctaccaagcaaatcaaaatcagaaaaaagcaggggttgcagtactaatttcagacaaaacagactttaaacaaagatcaaaaaagagaaacaagggtattacataatggtaaagggtaattcaacaagaaaaccttactaccctaaacacatatgcacccaacacaggagcactcagatttataaagcaagttcttggagacctacaaagaaacttagactcccacacaataatagtgggagacttcaatactctactgacagtattagatagatcattgacgcagaacattaacaaaaatattcaggatctgaactcaacattggaccaaatggatctgatagatctctacagaactctccacccctaaacaacagaatatacattcttctcattgtcacatactctaaaatcaaacacatgattggacataaaacaatcctcagcaaatgcaaaagaactgaaatcacaccaaacatacttttggaccatagtgtgataaaaatagaagtcaagactaaaaacatgctgaaaaccatgcaatttcatggaaattaagcaacatgctgaatgacttttgggtaaataacaaaattgaggcagaaataaagacgttctttgaaactaatgagaacaaatataccagaatctctggaacacagctaaggcagtgttaagcgggaaattcatagcactaaatatccatatctcaaagttagaaacatctcaaattagcaacctaacatcacaactgaaagaattagagaagtaagagcaaaccaaccccaatgctagcagaagacaagaaataacccaaatcagagctgaactgaaggaaattgagacacaaaaaaccattcaaaagatcaatgaatccaggagttggttttgtaaaaaaattaatgagattgataggctattagctagacaaataaagaagaaaagagagacgatccaaataaacacaattagaaatgacaaagggtgtgacaaagggcattttaccactgacccacagaaataaaagtaaccatcagaagctactataaacacctctatgcacacaaactagaaaacctagaagagatggataaattcctggctacatatatcctcccaagactgaaccaggaagaaactgattccctgaagagaccaataatgagctccaaaattgaatcagtaataagtaggctaccaaccaaaagtagcccaggaccagagagattcacagctgaattctaccaggtatacaaagaagggctggtatcattcctactgaaactattccaaaaaattgaggaggatggactcctccccaactcattctatgaggccagcattatcctgataccaaaatctgtcatagatgcaacaaaaaaagaaaacttcagaccaatatccttgatgaatatagatgcaaaatcctcaatgaaatacttgcaaatcgaatccagcagcacatcaaaaagctaatccatcacgatcaaatagacttcatacccaggatgcaagattgggtcaacatacacaaatcaataaatgtgattcatcacataaacagaattaaagacaaaaaaaaaacacatgattatctcaatagatgcagaaaaggctttcaataaaattcaacattccttcattctcaataaactaggtattaaaggaaactacctaaaaataataagagccatatatgacaaaccacagtcaacatcatactggatgggcaaaagctggaagcaccccccttgaaaactgacacaagacaaggatgccctttcccacaacatctattcaacatagtattgtaaggtctgcccagagcagtcagacaagagaaagaaagaaaagatatccaaatagaaagagaggaagtcaaactgtccctgtttgcagatggcataatactgtatctagaaaaccccacagtctcaccccaaaagctccttcaggtgataaacaacttcagcaaagttttaggatacaaaatcaatgtacaaaaatcaccagcattcctatactccagcagctaagctgagagccaaatgaggaagacagtcccattcacaattgccacaaaaagaataaaatacctaggaatataactaaccagggaggtgaaagatttctgcaatgagaattacaaaacactgctcaaagaaatcagagaagacacagtcaaacggaaaaacatgccatgctcggctgggcgtggtggctcacgcctgtaatcccagcactttgggaggctgaggcaggtggatcacgaggtcaggagattgagagcatcctggctaacacggtgaaaccccatctctactaaaagtacaaaaaattagccaggcatggtggcgggcgcctgtagtcccagctactcgggaggctgaggcaggagaatggcttgaacgcaagaagtggagcttgcagtgagctgagattgcgccactgcactccagcctgggcaacagtgcaagactccgtctcaaaaaaacaaaaaaacaaaaaaaattccatgctcattaataagaatcttaaaatcataaaaatgatcatactacccaaagcaatttacagattcaatgctgtacctatcaaactacattgacattcaaacaaatgacattcttcacatcttaatagtttttaagagttcaattatattaattatattcttactgttgtgtaataattaccaccatttacctccagaactcttttcatcttgcaaaactgaaatcctttgatttaaagtctatttgtcagagagcagtggttttcccagcacacagctggagatctgagaacgggcagactgcctcctcaggtgggtccctgacccctgacccccgagcagcctaactgggaggcaacccccagcaggggcacactgacatctcacatggcagggtattccaacagacctgcagctgaaggtcctgtctgttagaaggaaaactaacaaacagaaaggacatccacaccaaaaacccatctgtacatcaccatcatcaaagaccaaaagtagataaaaccacaaagatggggaaaaaacagaacagaaaaacgggaaactctaaaacgcagaacgcctctcctcctccaaaggaacgcagttcctcaccagcaatggaacaaagctggatggagaatgactttggcgagctgagagaagaaggcttcagacgatcaaattactctgagctacgggaggacattcaaaccaaaggcaaagaagttgaaaactttgaaaaaaaattagaagaatgtataactagaataaccaatacagagaagtgcttaaaggagctgatggagctgaaaaccaaggctcaagaactatgtgaagaatgcagaagcctcaggagcagatgcgatcaactggaagaaagggtatcagcaatggaagatgaaatgaatgaaatgaagcgagaagggaagtttagagaaaaaagaataaaaagaaatgagcaaagcctccaagaaatatgggactatgtgaaaagaccaaatctacgtctgattggtgtacctgaaagtgatggggagaatggaaccaagttggaaaacactctgcaggatattatccaggagaacttccccaatctagcaaggcaggccaacgttcagattcaggaaatacagagaacgccacaaacatactcctcgagaagagcaactccaagacacataattgtcagattcaccaaagttgaaatgaaggaaaaatgttaagggcaggcagagagaaaggtcaggttactcacaaaggaaagcccatcagactaacagctgatctcttggcagaaactctacaagccagaagagagtgggggccaatattcaacattcttaaagaaaagaattttcaacccagaatttcatatccagccaaactaagcttcataagtgaaggagaaataaaatcctttacagacaagcaaatgctgagagattttgtcaccaccaggcctgccctaaaagagctcctgaaggaagcactaaacatggaaaggaacaaccggtaccagctgctgcaaaatcatgccaaaatgtaaagaccatcgagactaggaagaaactgcatcaactaacgagcaaaataaccagctaacatcataatgacaggatccaattcacacataacaatattaactttaaatgtaaatggactaaatgctccaattaaaagacacagactggcaaattggataaagagtcaagacccatcagtgtgctgtattcaggaaacccatctcacgtgcagagacacacataggctcaaaataaaaggttggaggaagatctaccaagcaaatggaaaacaaaaaaaggcaggggttgcaatcctagtttctgataaaacagactttaaaccaacaaagatcaaaagagacaaagaaggccattacataatggtaaagggatcaattcaacaagaagagctaactatcctaaatatatatgcacccaatacaggagcacccagattcataaagcaagtcctgagtgacctacaaagagacttagactcccgcacattaataatgggagactttaacatcccactgtcaacattagacagatcaacgagacagaaagtcaacaaggatacccagcaattgaactcagctctgcaccaagcagacctaatagacatctacagaactctccaccccaaatcagcagaatatacatttttttcagcaccacaccacacctattccaaaattgaccacatacttggaagtaaagctctcctcagcaaatgtaaaagaacagagattgtaacaaactatctctcagaccacagtgcaatcaaactagaactcagaattaagaatctcactcaaaaccgctcaactacatggaaactgaacaacctgctcctgaatgactaccggatacataacgaaatgaaggcagaaataaagatgttctttgaaaccaacgagaacaaagacacaacataccagaatctctgggatgcatttaaagcagtgtggagagggaaatttatagcactaaatgcccacaagagaaagcaggaaagatccaaaattgacaccctaacatcacaattaaaagaactagaaaagcaagagcaaacacattcaaaagctagcagaaggcaagaaataactaaaatcagagcagaactgaaggaaatagagacacaaaaaacccttcaaaaaattaatgaatccaggagctggttttttgaaaggatcaacaaaattgatagaccgctagcaagactaataaagaaaaaaagagagaagaatcaaatagacacaataaaaaatgataaaggggatatcaccaccgatcccacagaaatacaaactaccatcagagaatactacaaacacctctacgcaaataaactagaaaatctagaagaaatggataaattccttgacacatacactctcccaagactaaaccaggaagaagttgaatctctgaatagaccaataacaggatctgaaattgtggcaataatcaatagcttaccaaccaaaaagagtccaggaccagatggattcacagccgaattctaccagaggtacaaggaggaactggtaccattccttctgaaactattccaatcaatagaaaaagagggaatcctccctaactcattttatgaggccagcatcattctgataccaaagccgggcagagacacaaccaaaaaagagaattttagaccaatatccttgatgaacattgatgcaaaaatcctcaataaaatactggcaaaacgaatccagcagcacatcaaaaagcttgtccaccatgatcaagtgggcttcatccctgggatgcaaggctggttcaatatatgcaaatcaataaatgtaatccagcatataaacagagccaaagacaaaaaccacatgattatctcaatagatgcagaaaaggcctttgacaaaattcaacaacccttcatgctaaaaactctcaataaattaggtattgatgggacgtatttcaaaataataagagctatctatgacaaacccacagccaatatcatactaaatgggcaaaaactggaagcattccctttgaaaactggcacaagacagggatgccctctctcaccactcctattcaacatagtgttggaagttctggccagggcaatcaggcaggagaaggaaataaagggtattcaattaggaaaagaggaagtcaaactgtccctgtttgcagatgacatgattgtatatctagaaaaccccattgtctcagcccaaaatctccttaagctgaagcaacttcagcaaagtctcaggatacaaaatcaatgtgcaaaaatcacaagcattcttatacaccaacaacagacagacagagagccaaatcatgagtgaactcccattcacaattgcttcaaagagaataaaatacctaggaatccaactcacaagggatgtgaaggacctcttcaaggagaactacaaaccactgctcaatgaaataaaagaggatacaaacaaatggaagaacattctatgctcatgggtaggaagaatcaatatcgtgaaaatggccatactgcccaaggtaatttatagattcaatgccatccccatcaagctaccaatgactttcttcacagaattggaaaaaactactttaaagttcatatggaaccaaaaaagagcccgcatcgccaaggcactcctaagccaaaagaacgaagctggaggcatcacactacctgacttgaaactatactacaaggctacagtaaccaaaacagcatggtactggtaccaaaacagagatatagatcaatggaacagaacagagccctcagaaataacgccgcatatctacaactatctgatctttgacaaacctgagaaaaacaagcaatggggaaaggattccctatttaataaatggtgctgggaaaactggctagccatatgtagaaagctgaaactggatcccttccttacaccttatacaaaaatcaattcaagatggattaaagacttaaacattagacctaaaaccataaaaaccctagaagaaaacctaggcattaccattcaggacataggcatgggcaaggacttcatgtctaaaacaccaaaagcaatggcaacaaaagacaaaatagacaaatgggatctaattaaactaaagagcttctgcacagcaaaagaaactaccatcagagtgaacaggcaacctacaaaatgggagaaaattttcgcaacctactcatctgacaaagggctaatatccagaatctacaatgaactcaaacaaatttacaagaaaaaaacaaacaaccccatcaaaaagtgggcgaaggacatgaacagacacttctcaaaagaagacatttatgcagtcaaaaaacacatgaaaaaatgctaaccatcactggccatcagagaaatgcaaatctaaaccacaatgagctaccatctcacaccagttagaaaggcaatcattaaaaagtcaggaaacaacaggtgctggagaggatgtggagaaataggaacacttttatactgttggtgggattgtaaactagttcaaccgttgtggaagtcagtgtggcgactcctcagggatctagaactagaaataccatttgagccagccatcccattactgggtatatacccaaaggactataaatcatgctgctataaagacacatgcacacatatgtttattgtggcattattcacaatagcaaagacttggaaccaacccaaatgtccaacaatgatagactggattaagaaaatgtggcacatatacaccatggaatactatgcagccataaaaaatgatgagttcatgtcctttgtagggacatggatgaaactggaaatcatcattctcagtaaactattgcaagaacaaaaaaccaaacaccgcatattctcactcataggtgggaattgaacaatgagatcacatggacacaggaaggggaacatcacactctggggactgttgtggggtggggggaggggggagggatagcattgggagatatacctaatgctagatgacgagttagtgggtgcagcacaccagcatggcacatgtatacatatgtaactaacctgcacagtgtgcacatgtaccctaaaacttaaagtataataaaaataaataaataaataaataataagaaaaaaaagtctgtaaagagactaaaaatacagagaaattaaaaaaaaaataaagtctatctgtctgtattattattgccaccatgccctattggttattgcttgcatggaatattttttttatcctttaactttcaatctgttagtgtccttggatctaaagtgagatatgttatctatcttgtagatagcatatagatagcatatagttagatcatgtgtttttattcattctgccaatctctgtctttggggaatttaatccatttatattttaaggaattattaataggaagggacttatgccattttgctacttgttttctatatgtcttatatcttttttgtccttcatttccggcattactgtcttcttctgtgtttagttgactttttgtttttggtgtttttttgagatggagtctagctctgtcaaccaggctggagtgcagtggtgccctctcggctcattgcaacctctgcctcccaggttcaagggattctcctgcctcagcctcccaagtagttgggactagaggcacatgccaccatgcccggctaatttttttgcattttttagtagagacggggtttcaccatgttggccaggctggtctcaaactcccgacctcaaatgatacgctgcctcggcctctcaaagtgccgggattatagacaaaagacactgcacccggctgtttagttgatttttacagataaacattttaatcctttctcatttctttaatttctttcttgtttttttttttcttataaacagagtctcaccttaatgctcagactggagtacagtggtatgatcatagctcattgcagcctcaaactcctgtgcttaagcaatcctcctgcctcagccgcctgagtagctgggactacaggcaaacaccaccatgtctaatttttaatttttgtgaagacagggtctcactcggttgtctaagctccttctcatttccttttgcatatactatatagctatttcctttgtggttaccatgggtgttacatttaacatcctgaagttataacactctaatttaaatttataccatattaacttcaataacacccaaaactcctcctttgtagctcactctccactctttttagttgatgtcacaaaattacaactttttacagtgtgtgtcccaaaacacaaattaataatttcttttaaaaatgaatctcctaaattatgtagaaaacaaaatgtaaccaaaattatcgtagtaatagcttttatcatttcccatgtgtttatttttattacaatcttatttgtgcatgtggcttccaactactgtctaatgttctttcatttcaacctagaggactcccttgaccattcttgcagggcaattctagtgcctcaatttttgtttatctgagaatgccttagtttctccctcacttttgaaagataattttgctgcatataggattcttgttgaccatttgtttcttttagcactttaaacaaaatatattagcccactgcttctggcctccaaagtttctgatgagaaatatgctgataattgtattgaagatttcttgtatgtgatgagttgctgctctctcgttgctttcaagattctctttgcctttgtcttttaacagtttaattataatgtgtctcaggatgggtctctgagtttaacctagttggagtttgttgagcttcttggatgtttatattcatatatttccatcaaatttggggaatttttagccattgtttcttcaactgttcttccaacccctttctctctctctcttctcattctggaatcctggaaagtctgaaatttttaatttcagttattttgcctttcaacttcagaatttctttttggtttcctttcaggttttctatctctttattggtatttcaatctgttcagatattgttttcttgaatttctccatgtcttcctttagttctttaagcatctttaagacagatattttaagcctttatctagttgatctgccattaggtctttctcagggacattttctgttggtttatatatattttttctttaaatgggctatattttcctattcctttacatatcttgtgattttttgttgaaatctggatatttgactctaataatgtgatgtctctgaaaatcagattctcctcttcctcagggtttgctgtttttgtttttgttttttgattgctgtaggctgtctctgtgctgagaatctgccttaggtatgaactgaagatcttttcagagcctacatcttttcctgggcattcatggtgattttctaatttcccccatatatgtagttgcttttgagtgtcctagtctttaaagtctggctcccaaaagaggaaaaagagaaaaacgaaggggggaaaatgcaccaatcctttaaatcccctggaagtcacttcaaccaaagggagagaggcttgcaacaatggagggaggtaaacaataatggccactgcctccctgttgcatctctgtgatcagaggcagcaatcaacgattggagctcaggtccctgatatttggaggacagggtcctttatttttatttttatttttctacctttttttttttgagaggagtcttgctctgtcacccaggccagagtacggtggcaccatctcagctcactgcaacctatgcctcttggattcaagagattgttatgcctcagcctcccaagaagctgggactacaggtgtgcactgccacaccaggctacgttttgtatttttaatagagatgggttttcactatgttggccaggctggtctcgaaaccctgaccccaagtgatctgtcgtcctcggcctcccgaagtgctgggattatagacatgagccaccacacccggcaatttttctaccttttttaccaaaggggaaatagggtgcttttaaaaatctagccttgctcccaaagttgtgtgcaaggttgctctaggaacacatgcacaactgcctgccagtgggatgggggtggaaggaggatgggtagctattgctgagctaagagctgaaattgatgaaaattatttgcaacttaccatccaagttttcccctggaagttgcaaatcttcaatagactacagagttccaaaatcgttgcatcaggcagattgctggattgtaattactgtctgggtggggaaacagattcctggtgctttctattcaatcatcttcccagcatcctctgtggcctagtgtacattttaatttttattatttatttatttattttcttagacagggtctcactctgctgcccatgctggagtgcagtggtatgatcatggctcactgcagcctcgacattccaggctcaagagatcttcccacctcagcctcctgagtagctgggactacaggcacatgttaccatgcccagctaattttcgtagagatggggtttcaccatgttgctcaggctggtctcaaactcctgacctcaggtattccacccaccatggtctcccaaagtgctgggattacagatgtgagccactgtacctgggcaaatctcatggtaacttttatgttaactttaaagtgaaacgaaataattccttaattgtatgaattaacctttagaagttccatggatggatccttgttcttgcctaagttcgtagggcaggcatatctaatggtcagaaatatgagctggggagtttaggtaattagatatgcttactaaggctatccatgtttactctgagagaagtcaactgatgttttgtttgtaggtcattgtataatatctgtttgggaggctctagattctttttaaatgatttgctttgtaatgggctcttcagtttgaagtactgtgtataatttagttctgtgtacaatacaatccccaggcccctctttaataaagatgtttacctacatttccttctcaagtgctctgttgccctttaatcagatcaaacttgatctaaaaaaatcaggtccttttactctcagatgctattttatactctaatcatggttgggatacttcagaatattagaagtagcttgtcaggttccagccacttgttcaaaatctgggcaactccagcttcacctctcagtatgcctaaaggttaattatatttacaggataaaaaaattatttaatctcatgaactcagtgtctggctttatgataatcaaccatggtggtttgcctgggactgtctaggttttcatgctgaaaatatcctgtgtcctggggaaatctctcagtactgaataaacgtagacaacttgtcaccctatttggcctacaaatatttcctgcttttctttttaaaagccacataaaagccagatgtaagggtatcagatgactgctaagttgcatgttcttgttcttcttaatctctatttatttatttagagacagagtcttgctcttgtcacccaggctggagtgcaatgacgtgatcttggctcactgcaacctctgcctccggggttcaagtgattctcctgcctcagcctcctgagtagctggattacaggtgcctgccaccacgctcaggttttttttttttttttttttttttttttgtatttttagtagagatgggggtttcaccatgttggccaggctggtcttgaactcctgacctcaggtgatccaccccacccgccttggcctcccaaagtgctgggattacaggcttgagccactgtgcctggccgctaaatttctttttatttatttgtttgagacagaatctcactctatcacccaggctggagtgcagtggtgctttttttggctcactgcaacctctgcctcccaggctcaagtgattctcctgcctcagcctcccgagtagctgggatcacaggcacgtgccaccacactcagctaatttttgtatttttagtagaaacagggtttcaccatgttggccaggctggtcttgaactcctgccctcaagtgatccacccgcctcggccttccaaagtgctgagattacagacgtgaaccactgtgcttggccttaaatttcttaatattcacagactgctggcagttttgaccaagtaaggagttgagagacatcctgtgctacaaccatctgagtttacagatgaataaaatttcaattgcataggcaagttttggctatcttccttccactctggctgctatggcaccagatttctgcaatgtcttcaaacatctcctttccactaattaaaaacaaacaattatgttggaacatcaatcacagtaacaggaaagagtagcattcggttagttttaaattgtccaatagtctttttctaatgtctctatttgcgtcataggagttttaacttcccttgtgtctaaagttcaatgtctctcatggattactcatattatctgagtgtgaaaataaatatagtcgggttaattagcatcaattttcataaaatcccagagtaattttacacaatgcttcctgggaagaaataaattaaacttgataactgagatgatgggatctaaaatagaagctatgcataaaggaaacaaaataaacacagaaaagggaaaaagatattgtgtgcattatgtgtgatatatagataaagttttcttttcagaatcacaccttgggcctttgttattttgcctccaaaggaagtcagtcttgggtcccaaacaagcagactgaccttgtgggcttgtagagaattcaaataccccgctccaatacttggtcattctgtttcagtagatctggagtgggacctgggaatctctctttttaataaactttaaaagtgattctagtgttcctggttaatggaataatgtctgggaaccactgcgttaggtaatttgaaggggctttcctacttttcactttggaaaaaaatatttagtgatcattcttgagattttgttgagatgacaggtatcattgtccttccttaaaagggggaaattgaagaaggtggagtcatattttaatctaaaaatatgggaaaatgaggacctttaccctgcagtttgatcttgaagagtagattgagatcctgaagtaagatctgctgtaaagtgcgagggtgaattcctccagagggcatgagggactatgcaaagcaatgtgtacattttgagcttgaccataatgaagaaactgagtggaggaggctcctggagactgcccagagttcctcgtttttcaattgtattctaatttatgctgtagagattgtccaacactaatcaggtggagaagagatggttaaagtctctcttgctcattatccataatggaagtacttcttattaggttcatctttacttggccttgtacacatatccacataccctgaaaaatcctctgggaaactgacacaaggccccagatacttcattagcagagtggattccccagccctgtcacttatggtatagcagaagatgtgcttggcaatttaattggatggctgtaaagctggaatcctgaccactagtgggcactgaagatcccaggagactttccttatggcaggtagagtgctggacaaattccaactctgataattaaattacattctgcccagctcccctgtgcactttcaactggactctgttccctttccatccttaattgcggtggtcatgcactttaatagagaaccactggtttctaaagatgcctacaatataataaccatgtcccataacttatggagtgagattcaccgggttaggggtctagtggcacattttaatgtggcatattgtgtacaaaggggaaattactggattggtatccaaagagacatggatcactcctgaaaaattaaatctgttaaacatttcaatacatattaaaaatgcatgctctattagctttagaagccatttttcctgttcctttatgggagatatctttctataaacaaagtaattagtagttataccttattagcagactaaatccaatgtactttttaaaaaagcaaacaggccgggcgcggtggctcacacctgtaatcccagcactttgggaggccgaggccggcggatcacgaggtcaggagattgagaccattctggctaacacggtgaaaccccgtctctagtaaacatacaaaaaattagccgggcgtggtggcaggcgcctgtagtcccagctactcaggaggctgaggaggagaatggcatgaaccggggaggcagagcttgcagtgagtcgagatggcgccactgcactccagcctgggtgacagagcgagactcgctctcaaaaaacaaacaaacaaacataggcatgggcaaggacttcatgtctaaaacaccaaaagcaatggcaacaaaagacaaaattgacaaatgggatctaattaaactaaagagcttctgcacagcaaaagaaactaccatcagagtgaacaggcaacctacaaaatgggagaaaattttcgcaacctactcatctgacaaagggctaatatccagaatctacaatgaactcaaacaaatttacaagaaaaaaacaaacaaccccatcaaaaagtgggcgaaggacatgaacagacacttctcaaaagaagacatttatgcagtcaaaaaacacatgaaaaaatgctcaccatcactggccatcagagaaatgcaaatcaaaaccacaatgagctaccatctcacaccagttagaaaggcaatcattaaaaagtcaggaaacaacaggtgctggagaggatgtggagaaataggaacacctttacactgttggtgggactgtaaactagttcaaccattgtggaagtcagtgtggcgattcctcagggatctaggactagaaataccatttgacccagccatcccattactgggtatatacccaaaggactataaatcatgctgctataaagacacatgcacacgtatgtttattgcggcattattcacaatagcaaagacttggaaccaacccaaatgtccaacaatgatagactggattaagaaaatgtggcacatatacaccatggaatactatgcagccataaaaaatgatgagttcatgtcctttgtagggacatggatgaaactggaaatcatcattctcagtaaactatcgcaagaacaaaaaaccaaacaccgcatattctccctcataggtgggaattgaacagtgagatcacatggacacaggaaggggaacatcacactctggggactgttgtggggtggggggaggggagagggatagcattgggagatatacctaatgctagatgacgagttagtgggtgcagcacaccagcatggcacatgtatacatatgtaactaacctgcacagtgtgcacatgtaccctaaaacttaaagtgtaataataaaaaataaaaaaataaataaaaaagaaggaaacacacaaacaaacaaacaaacaaacaaaaaagagcaaacaaaacaaaacaaaacaaaaaacccagctgagcaaagtcaatagaatagagaggtagaggtgagaacagttagacatactgggaatcaatttgatgacttgaaatttgttgatgtagaatttgacctaatgtgtgtcttcataataaacagtttgtctggttttactcttctactgtgtttttccaaaatggttaggtttagagggcaatgtgctttctcttaacagttaaattttgttatttttacaaattgctttactaatacagattttttaaaacaaatgagaattcagtaaactgcatatttactgagaatagagtgctgtcatgtaagatgaacaaactttattattcagcaggttgtctgtttcttggaaatagaactctctctaaaatatttgaaataatgaataaaatgttattttctaatcatagataactttccatttaaaaagtatttaacatatattctttttatttttattttattttttgtttttggagacggagtttcactcttgttgcccaggctggagtgcagtggcacgatctcggctcactgcaacatccacctcccaggttgaagcgattctcctgcctcagcctcctgagtagctgggtctacaggcacacaccacgacgcctggctaatttttgtatttttagtagagatggggtttgaccacgttggtcaggctggtcttgaattcctgacctcacgtggtccactgccttggcctcccaaagtgctgggattataggtgtgggccactgcgcccggcctattcaacatacattctattaataaaccaaacaatcccagtatttggtatcttgattaactcatgtatatttaggaaagcaaaatgtacttcgtagcttatgtagtttgtcaacacgtttaagtccagttggagattgtttttgtttgcttttattattattgttaaactaattttctgtttcaagtaatatacctagcttagaattttctacctttaatacaaaacgagtcaacacatagctcctgcacacctacagccacacaatgcttaaattttggaattctgtaatcattttctgtgcatcttctttctaagccacactaaatattgctttacttcaattagattaaggagaaaaaatagagatcagaaggtagacaatagctggttttcattgtaaggaagctggttaattacctgggttaatgtgaggaaggtgtttgagtgtgtattaagaatgcctgttggccggacgtggtggctcacgcctgtaatcccagcactttgggaggctgaggtgggtggatcacctgaggttgcgagttcgagaccagcctgaccaacatggagaaatcctgtctctacaaaaaatacaaaattagttgggcatgatggcacatgcctgtaatcccagctactgaggaggctgaggcagaagaatggcttgaacccgggaggcggaggttgcggtgagccaagactgagccattgcactccagcctgggcaacaagagcgaaactccatctcaaaaaaaaaaaaaaatgcttgtaaaaattgtttatttatttatttatttttgagacagggtctcactctattgtccaggcttgagtacagtggcgtgaccatggctcactaaagccccaacctcttgggcccaagtgatcctttcacctcagcctcccaagcagctgggcctacaggtgtgcaccaccgtgagtggctaatttattttttatctttaatttagggaaagaattttgctatgttgtgcaggcggatctcgaaatccaggctgaagcaatcctcttgccttggcctcctaaagtgctgggatgataggtgtgagccaccacatcccaccaaaaatgttttaaatataaacatagtcctgtaatgaaaggagttggaagtttatcttagaaggtctctgaaaacaggaaaaattctcagaaatatagatggcttgtgaatgattctgtcctgtgcttgaaataaaaaatataggtagagattgtttgtttgttttaacggtaaattttaaaattctgaaagaaaaaaagaaacaatgcatcagattgtgctattttttatagaggtttaaaatgacctagtgaaacatgtggctgattgaaacatgttcatctctctttcctctagagacttctctaaaatgaaagtaaagaataaaaactctttatagtcacaatgtcaaagagaagaaaataaaagccattatcttttgggagattttccacattatcaatctggcataatgatttatctttctaagggtgaactgctgacccttccaagatggaaagggttctctccctctctctctacatatatatagtcaattatattgtagttcaaggtattttataatttccattgtgattccttctttgtcctatgcaaaatccataagtttatttcttagttttaaaatacattttctttttttttttttttttgagacggagtttcactcttgttgcccaggctggagtgtggtggtgctatcttgcctcactgtaacctccacctctcaggttcgagtgattctcctgcctcagcctcccaagtagctgggattacaggcatgcgccaccacgcctggctaattttgtatttttagcagagatggggtttctctatgttggtcaggctggtctcgaactcccgacctcaggtgatctgcccacctagggcctcccacagtgctgggattacagacatgagccaccatgcctggccttttaaatacattttctagttatctttttcttattgcttttttaccttaactgcatttggatatcatatactctatttctattttttagtggtttccctgaaaattccaacataagtatttaatttatcaaagcttaaaataaatcaacacctttatccttttcttcgataatacaaggtcctggggataccttaacctcatatacctcactttcatcttacatgatatttttggcatgaattgattgaccacagggtattactattgttatattatgcagataatgtttatttagatttatgtacttatcactttattttgctttttatttttttctgtcttctttcattctatctgggagtactttccctttgcctcaaatataccctttaaaatttcctttacttgaaggtctatttgtagtaaaatgctcctatttttgcttttctggaaatatctttatttgcctttatctttgacagattatttgatgtagaattctagttgttaaatattttagtatattaaggatattatttaataaattctgatttcttcttcatttaaagaagtccttgttactttatattcacactctgtaactgcacaggacttcagaggagggagatatgggaaagctttatattgtaatttggtttttatttgttacagggaaatagaccagatatggttgggagagcagacagtgactttcagggaggtggaatgattcatgcaaaatgagagtggggcacagaggactcttaggactgtaaaaccattatatctgctactctaatagtggatacatgtcattatgcatttgtctaaacccatagcaagcataacaccaaaagtgaactctaatgtaaactatggaatctgggcgataatgatgtgtcaatgtaggttcatcaagtgtaaaaaatgtaccactctggtatgggttgctgatagtggaaaggctactatcatgtgttggtgcagggagtatatcggagccccctgtactttcaactttgcggtgaaaataaagttgccctaaaacatagtctattaagaaatatatcccactattttctggcttccagtgttttctgttgagaagttaactgtcagcctattactcatttgtatttaatctcctttttatctatgagtgcacttatgcttttttattgttgtagttgggggttttacagtttctttttccttttttttagtgttggggtttttctctgttgttcaggctggagtgcagtggcacaatcatggctcacggcagcctcaaactcctaggttcaaatgatcctcccacctcagcctcccaagttgctgggactacaggtgtgtgccaccatggtcacctggctaagtttaattctttttttttaagacataggatcttgctatgttatccaggctgcacagtatcatcatgatgtgtatcagtttgaatttttaaaaatttattctatttgggattcatttggcttgaatctggcttgaaatctttcattagtactgggaagctgttacttcgatattgcttctacatctttctcttttttctccttatggaacttcaattaaatcaataaagtgagacaagctcacttgattctccatgtctctcaaacgctgtagtatgtttagtctgtctttatattgtgcatttcttgatcattacttctgatgaactctgtcttcagtcatgtctaatctgctattaaactggtttgttgagctttccattttattttgtttttagaagttgtttctttcaaatttttgttatgtcactttgtgtattttcctctttcctgaagatatttgcaagcttgtcttttatgtttttaaacatagtgaatttttttatctctgtgtctgataatattggaaggttttgaactcggttcttatgcttgtggtttctactgtttccctctcatggagcttttctttttcttgtgtcctttgattgtggattgtttatattaaaagtttatttatacaaatataaattgaggtgcaaaattaaggtgccgcctctagagaagttttgtattgcttctgtcaggcagcagcaagtaccagtctgggattacggcttaaccatgatcatggttccaggtttcttgttccaccagggtgataatgcttcactgttttctgaagttacagtcctttggaactccagcttactgaggagagcttttcctagtagaatctccacagtgtgtgggccttgcgctttgattttattctcctgggctgccagatgccatcagggaaatcctgcttctgtgctggcttttccctctagtctctacttttccttcagttttggcctggtaatcgctttatatcttgggatctttttgatgctttaaaaaatattgaaaaatagccagatgcggtggcttatgcctgtaatcccagcactttgggaggccgaggtgggaggatctcctgaggtcagaagttcgagaccagcctggtcaacatggtgaaaccccatctctaataaaaatacaaaaattagccaggcgtggtggcgggtgcctgtaatcccagtgagaggtgacagcatgctggcagccctcactcactcttggcacctcctcggcctctgtgcccactctggctgcacttgaggagcccttcagcccaccactgcactgtgggagcccctctctgggctggtcgaggccggagccggctccctctgcttgcggggaggtgtggagggagaggcgccggcaggaaccagggcagcacgccgccctcgcgggccagcacgagttccgggtgggcacgcgctcggtaggtcccgcacttggagtggcaggctggcgccgccggcccagggcagtaaggggcttagcacccaggctagcagctgcggagggtgtgcagggtcccccagtagggctggctggcccgccgcactcgaattcttgcagggcctcagctgcctccccacagggaggtctcaggacctgcagcctgccatgcccaagcctcccccgcttccctcccccctccccttggctgtgggctcccatgctgcccgagactccccaatgggcactgccccctgctccgtggcgcccggtctcatcgactgcccaagggctgaggcgtgcaggtgcacggcgctggactgaggagtgcaggcaccaggcgtgggactggcgggcagctccgcccgcggccctggcactgcatccactaggcaaagccagctgggctcctcagtggggtggggtgttggagaacttttatttctagctggaggattgtatatgcaccaagcagcactctgtgtctagctcagggtttgtgaaggcaccaatcagcactctgtatctagctaatctggtggggacttggagaacttttatgtctagctagaggattgtaaatgcaccaatcagcactctgtgtctagctcagggattgtaaatgcaccaatcagcaccctgtcaaaacggaccaatcagctctctgtaaaatggaccaatcagcaagatgtgggtggggtcagataagggaataaaagcaggctgccccagcagcactacttgggtcaccttccacgttgtggaagctttgttttttcgctctttgcaataaatctcgctgctgctcactctttgggtccacactgcctttatgagctgtaacactcacaacgaatgtctgcaggttcactcctgaggccagcaagaccaggaacccactgggaggaatgaacaactccggacgggaggaatgaacaactccagacgcgcttccttaagagctgtaacactcactgtgaaggtctgcagcttcactcctgaagccagcgagaccacgaacccaccagaaggaataaactcccaacacatccaaacatcagaaggaacaaactccggacacaccatctttaagaactgtaacactcaccacgagcgtccgtggctgcattcttgaagtcagtgagaccaagaacccaccaattccggacacaccagctactcaggaggctgaggcaggagaattgcttgagcccgggagacagaggttgcagtgagccgagatcacgccactgcactccagcctggaagacaaaagcaagactctgtctcaaaaaaaaaaaaaaaaaaaaaaattgatctgacaattttagtcaccttcagtgagagggcgatcttaaaaacctttttagctgttgttggctgccagaaagatctcaacaaaatcttggaatcagaaagaagttgaaatagaggtgactgatacagctatgtggtagaattccaccactgagcattttcagaagaagacaatagcattataaaaatttgatttgaccccacagaactttatgagacttcaggttcagagatgccaggtttaaaaaaaaaagagtagaggtgagatgtaggacctaaaacagactgattgtgtaacactgacagtaggtgcctaccctccggtggcagataggaggtttttactctgaagaaattgaactgtctcaggcttccacatgctggccgtagagtttctcccagaccatcccccctcggcatctccttgcctacccatcacaaagtgaaatccattgattaaaacactgttcgtatacacaggactttcaatcattttatgtgtgtgtctgcctcatgtcaatatgaacaggtgactaagaaacagtaaagaagggtagaaaatttgcttaagggagaaataaatccagaggaatcagggatagcacagagaatcttaaaactctcatctcttagataagaagaatattaatgcctgtaaaacaagaacaagataaaatgaaaagataaaagagaacaagaacgatctcttgaaaagcaaaaatacaatacctgcgaaaagcaacagaagatctttagatggtataatgaaaagttttaagatatggaaaataggagagaagatacgagacttaaagaagcagacaactaaaaggtgttccaggaagagagaaagcaaatggagaggaggactttataaaacaatataagagctaactatggcagatttctagatcaaaagggcaccttgaatgcttttaaaatgaatgaaaaaggcatataaccattacattgtaatatgctagggaaaaagaaagtttccaaagagaaaatgtagattgctttcaatgaagaaaaactcagcattgtcattggatttctcaaagcaacattgattgttgggagacgatcaaggaatcaccccaaaatttgaaaaaaatgaattcaaacccatgtaattgctaaattagctaaatatgatcatagagacaagaatgggaaactgagtatttgtagggaagaagagcttttattaaaagacttttatttaatattttacctgaagtatatactaatttgaaaaaaattagcaacagtaaaataagtaaatgtaaaaaacaaaaagcttcataatacagacatttttggaatagtgtgaaatggtattcttcctcattctgtcgtgtcttatttactgctctggtctgtgaacaagaagaatgatctagtgcaccgtttgaggacttttatttttttgcgccaaatcattctatacatctaaaatttgttataacgtttggatatttctgtctgagatggttttaactgatgtttaaaaatttgctaattttgtattaaaagcatcaattgggacagatttaagatattccactttgagtatctaatttgatgcttacttctggcagtcactgaactcttaacagttgaagttgctgttggctcactaggattttaattaggcagctgaatcccatatgtttatgtgcactactttgatttctctagcatgtttatttgggtggttgtggcactttagcaccctaccttcccaagggacacacagacagtctgagaatttggtatatgaaataaccacagaacacatatcagttaatcaaacaccctaggcccacactttttttttttttttttgtgacagagtcttgccctgtcgccaggctagagtgcagtggtgcgatctcagctcactgcaacctttgcctcctggttcaagcgattctcctgcctcagccttctgaacagctgggactacaggtgcccgccaccatgtctggctaatttttgtatttttagtagagacggggtttcaccacattggccaggatggtcttgatctcttgactatgtgatccacccccctcgacctcccaaagtgctgggattacgggcatgagccaccgtgcccagccacgcccacacttctaaaacctaaatggtaagtgttgtaaattttgtacattcgtctttatcaggtttgttgctcttgttccttgtttctcattctcatttcaatactaatattcattcacatcacctctttaaaaattattgcgctcacttcctttcttatttttactttcaatctctagtgttcaatgcctcttgaatagcattgctaaaattatttaccaaaaatattgctttaatatctctctcctgctctaagatcttcagtgttttctttttttcttatttcctttaactagggaaataatctccaaagcgaggggtgtggacccaggagatgtgaaggacaatccattggcctaggcaagaatgtagccaaacttttagttcctatttccacactacgtaaataattatatatgtgtttaactaaaagggaagaaaagttaaattttgctaatgtttcctacacagatattgatacaggaactatctttcagactgtatgtcagatgatcatgtattgcttatggtatctgagatatctggaattaatgattagagttcaagtgctgagaggatagcattggtactgcattttttttggattagcttctagcatattgtgatatttttctatttatatgtatctggttatggacttattatttgatttatgtataggcaagtggcttaaaaaaatttcaggaaagaaaacacagattgtagagaatagtaattgcaagtataagagaacaacaaaaaggccaaggtgttacttttattcatggtgtgaaaactttgtaaaccacattatgtagtaaaaagaatgcaactatgaccgggcccagtggctcatacctgtaatcctgataggggcaagtcacttgaggccaggacttggaggccagcctggccaacatggcaaaaccctgtctccactaaaaatacaaaaaaattagctcggcagggtggcacaggcctcaggaggctgaggcacgagaattgtttgaacctgggaagtggagattgcagtgagctgagatcacgccacagccctccagcctgggcgacagagccagactctctctaaaaaagagaatgcacctaatcaggtctgacaaagctttggccaaaagattcaaaattattgaaataacaatttgaaataggaattcatcttatatttaataataaatttcagtttaggcatgtattgtgctggagattttagttaatggtatcaaggcattaaattagcaagatattaataaactaaacacatgaaaaggacagattcaggttctgtggagcttgaatctgtgctgattttggaggactctaggagaaaaaaatataaacttgcaaatgcaaaatcagatgaacatctatttagaataagaaatcacaacagatcactcattttaagaagcaggaaatactacaaacacaggatccaaaaaagtagcaatattcttataaatcaactgctgacatgcctctatcatacgttttttctgtattttgttagctgcatctttgccttttcatgtgatgattattttgtaatgttttctaaagatagatagatcatttctttagcacggctcatcaaaatttgttttttatagctgaaaataatttgctattagtactgttatatagatttcttaaattgtgaaattttggggaacctctttcatgtttctttatatatgagctgtaatatttcaatgatgtgcatattttatcatgcaagactaactttaaatcctctttgaactaataaatactagtctgagaaaattcaaatgtatttaaaaattgctgttattttgtagtgagccacataattatataatcaaattattctcatgttatgttttgacttatgaataaatatgtgcaggaattatgtcataagaatgcttgtttcttttatttgttctgctatttggtggcaattttgtatgccatgttatttagaattaccagatttcaccaggacaagataaatgagacatcctaagatgtgttcttttaagttgggaaacatagaacatgtgactttgcatatagacatacttattgattgtagtattgctacaggtttgtgataaattatgaacaaaggaataataagttctattttatgtgattacagtaaaagtaaaactaaaaatttatggtttactttgaatatgatgacttaaaatatgtaattcatatttacttaaaatatgaatatgaggagagaatttctagtgagaaacaaatcttttgcttataatttcacatatcttatgactcaaaacattttcaacagactagcttctggttccataatttcaaaccttgtttcttatccacttccacatacttttggttctgcatgccatagaacacattcatatatgagatgacctttggttctgcacctttacgtcaccaccacaggtgactcagacagtgggcaggagtattcctggaagccatcctctactgggatggctaatgataacttaactacacatggacagcctagaaaccacataaatatatcccactaaacccaaactaaatatattcagagctctacttcctcttattcagaccccaaaaatgctttcagccacttatatccatcatgctaacatcgtattaacatgaagggaagtgtaaggaagaaaatcagagtggaaaggaattgtagtcaaacgatcttaccttaatctcacctttgcagcctttgtagaaacatatggccatatggatacattccaggggagatgcccatgctagcgaggggtcctgaacttaagcttcatggcaaatgtgtctctatcttcaaaaaacgaagtcaaacagctacacatactataataatgtttagaggcatttggtgctgaataaagtatagaacattgctgaacttaaattcttttgagatgacttccttatttaaaagtgaacaaaaatcccacccatatatcttttggtacctatgtcagccactaaaatcaactattgaattaaaataaatatgccagacttttgaatcacattgtcaccaagtgttatataaagattaacaaaaagtatattaaatcatattgctctcattaaaaatatttatttttttcagagatgaccaaaaggactttgtaccataaataaagatatttaaaataatttttatttcactttttaagatatgttatataaagtatatagtatatcagtttgttatacatatatgtacacaatatatgtacctatgaacatacatatgtacatacatacataacaccgattagggtgtatgctcaaaagtctttactgataagatgtacaattcaaagtatttgagtatcggctgggcacggtggctcacacctgtaattccagcactttgagagccaaggcgggaggatcatttgagtccagaagtttgagaccagcctgggcaacgtgatgaaacccagtggtgcaggactgtagtctcagctacttgaggctgatgtgggaagatcgcttgagcgtgggaggcagaggttgcagtaagctgtcatcgtgccactacactccagcctgggtgacagagcaagactgtattaatctgttttcacgccactgataaagacatacctgaaactgggcaattaacaaaagaaagaggtttaatccactcacagttccacctggctggggaggcctcacaatcatggtggaaggcaaggaagagcacatcacatcttacgtgcacggcagcaggcatagagagtgtttgtgtggagaaactcctgcttttaaaaccatcatatctcgtcagatctcgtgagacccattcacaatcatgagaacagcacaggaaagacccgcccccatgattcagtcatctcccactgggtccccacatgtgggaattatgggagctacaagatgagatttgagtggggacacagagccaaaccatatcaaagaccctgtctcaaaaaaagaaaaaaaattggggtatcaaagacagtcaattttttcctaagatgggtctcactctgttgcccaggctggagtggagtggcatgatctcggctcactgcaacctctgcctcccaggttcaaatgatcctcccacctcagcctcccaagtagctgagattatgggtgtgaaccaccgtgccaagctaatttttgtatttttagtagagatggggttttgctatgttggccaggctggtctcaagctcctagactcaagcaatttgactgacttgacctcccaaagttctgggattacaggcatgagccaccacactcagccaaagacattcaaaatttgacccaaagttctccattcttaagctggcctgaattactctcaatccctaaaacaagtctttatatttctaccctagtgtcttagtatctaagtaaatcctaccctaactttcaacttcgagtgtctcctttttttctgggttactcaaatattctccgcctttgaattaaagacttaaatgtaaggcctaaaactataaaaaccgtggaagataacctaggaaataccattctggacataggatctggcaaagatttcatgaagaagatgccaaaagcaagtgcaacaaaaacaaaaattgacaaatgggatctaattaaactaaagagcttttgcacagcaacaggaacaataaacaaaataaacagacaacctgcagaatgggagaaaatatttgcaaaccatgcatcctacaaaggtctaacatccagaatctgttaggaacttaaacaagctgacaagcaaaaaacaagagacctcattaaaaagtgggcaaaagtcacaaacagacacttatcaaaaggagatatgcatgtgaccaacaagtatatgaaaaaaaatgctcaacatcattaattattagagaaatgcaaattaaaaccacagtgagataccatcatacaccagtcagaatggctgtcattaaaaagtcaaaaaataacatgctggcaaggttgcagagaaaagggaatacttatacactgctggtgggaatgtaaatgagttcagccattgtggaaagcagtttggcaatttcttaaagaactcaaaatggcattaccattcgacccagtaatcccattattgagtgtatgcccaaaggaatataaattgttctaccataaagacacacatcacatgtatgttcattgcagcactactcacaatagcaaagatatggaatcaacccaaatgcccatcagtgatagactgaataaagaaaatgtggtacatatacatcatggaataccatgcaccaaaaaaaaaaaaaaaaaaaaaaaagaatgagatcatgtcctctgtagcaacacagatggagctggaggtcattatcctaagtaaactaacacaggaacagaaaaccaaatattgcctgttctcacttataagtaggagctaaacattgcgtacacgtggacacaaagaagagaaaaacagacactagagcctacttgaggatagagggaggaaggagggtgaggattaaaaaactacctatggggtaccatgcttattacctgggtgatgaagtaatctgtacaccaaacccttgtgacatgccatttacctatatgacaaacctgcacatgtacccttaaacctaaaataaaagttaaaaatgaatcctcttatccgtcttcagggacctgtgcttcaaagactcctctgacctcttcaattgccagagttctcttgtaatgttaattatttttttttttaagagatgagatcttgcgctattgcttgggtgggggtgcagtagcacaatcatagttcactgcactctcaaactcctgaagttaagcaattctaccacctcagcctcctgaatagctggaactacaggcatgtgcctccatgctggctaattaattttgttttttaaattttgtagagaagggggtctcacttttttgcccaggctggtcttcaactcctggcttcaagcaattctcccacctcggcctcccaaagtgcttagattacaagcatgagccacagtgcctggcctcattttgttaaatgaatgtcacttactattttcaatatgctcttagcacttagtgatatcatacttattttgttaaatgagtgtcacttactattttcaatatgctcttagcattaagtgatatcatactttgaagcatctcttttattgtattatttgttgtaatgcgtatgtatcttatttttgcagcttctcaaaggcaaacctcgctcatatacttttgtatccctcactgcacctaacataagtctatgcaaatagtagatcctctgtgaagatttgtggaatcaatacctttttaggaaaactcaagctgaggggagatatctttgtagttgagagagctctctgtgagaggaggttgtgtgaaggcagtcatggtgacagccttttctttccagtgacacagtgggaggaaagttctcccctgtacacatctatcccgtgctgagaatgtaatccccatgatgaatatcaagtgagtgatacatgctagaatctcaaactatgacactaaagggaaagaatgacgagataattttgtcttctcaaccactgacttttctgccttattcatcatgagatcatgttcactaacaacggcggatgggagagtggggatctgtctgtccatctcatactagtttggcatctctgtagaaagaaaaattgacagaaaaagcaactgtttcctttttaagcatccttctgtttgctcctttctgttttgtctgtttctgaagtgcactttcgccgtccctctaaagatgttggttcttttataacagcagaggtcctccttgctcagcagtcctccaggatcaagaaactactcatcctaaaagctcgagatcactgggaactgcgtgacttaaacagatgattaaagacccattgtctgtgctgtagctgggtttatgatgccttttcatcacgacacctgccaacatttcaaggttctaattagctgccaatcagggtaaaaagctcagaataagcagcattgtgcctggaattactatgtggaagtatatgcaaattacttgggttaaagataaagaatctgcactttagagaatgaaaagctgtattaatctaggattattaaacattggtaaatgcattattgaccttgtcatgatgccagattgtgatcaagagccatcccagattttctggacagtggtaaaacatgctggctctggcctggctagttccatttgaatagcagggagcagaaaaccaaagcctatactaatctgagtgtgtctggagtcccgagcccatgagatcgggacaagctctaccctgtgccacccacattttcccatctgtatccatctcccactgtgttatcagacactccagatggagcttcctgtaccattgttaattattattattatttttttctgttcacccataatgtctctgaatctactggcactgcaactgttgtctttgttggaaagaaatgatagccttccaaaatggtgatgacggcatatctttgtgagcttttaggagcaatgtgcatactatttaagttttaaaaaataataattttgtcctgacactttaaaaaagtgaatttctttataattagttccagtgtttaggattgctttaaaaatcactagtgttttttcctttaaacaagaagaaaagattcagcttgtttttcttgtttggtatttttttttggatgaaaagcactatagaaatgtaagctattattaatccaccccttctccagacacatgttgacgggggctctaaaatgtatatcagctaacggcatgtctcagctcaaagaaagctgcaaaattatcttgaagcatgttcttcgaatttgcccaaagcctgtctatttccatggaaatagaagtggcatcctgcagctgaggctgctgttggttttagcagttacagcaggtttagctggatggatactacctcctggacaatacttaatgctttttcctaagtgttttttatagcaagggtagggaatgagttaaattgtgcctggatacagagggacagacagagagatcttgtagatttcctccaaagccttgcatattataataagatcttgatgactattacttctgttgcaactgcctgcttactggtattgcatagtaagatgaagaaaaaaatcatcatgttttgcccaacagctttaccagctgtgtgcctagttggaattttctaagtaatacttccttttccactattggccacagctagtgttaactgaccctaagcaatccagtaatcaaagtctctgttatcattgtcctctttgggatattaagtacatgcatgtgtgtatcactgtgttgggcactgcataggccagacagagacagctaaaggccactccaatgcagtgaacatgtggaggacatggtgggaactagcaagcccctaacacgataggagttgacaagcctacagacttgcactgaatgccaattaatgtaagtgcatttgatgaattaccattttttttttaaccagggtgagatttgtagaaatttgtgcaaatttggaaaatttttattgtaatttggaaatgagtgatagcactgagtccttcttagtttcgtatccctgaacccctctagaagaattgtaggagccttaggttgttaacatgggaaccattaagacatcttcttaaggtctcacttggatcctatttcctgaatagctctgtgaggctaagctttaccgtatgttttagttatctgttcaccatgaaactctggtttaaacaacaatcatttgtttgcttatgattatctaatttggctatgactcagcaaggacagtgtgattctgtcctatgtggtattaacttccaagatggctggctcacatagttggcaaattggaactcagctgcgggagtcagccaagggtgccttggttggcaggattcccaggttcttctctgtgtggccagcgtgggcttccttacagcaaagtggtccagggtagtcgtattccttacattatggctgccttcctccagagtgcaaacgcagaagtcccaggccttttttaggctagtcttggaactagcacagcatcacttctgccaggtcacaagggtggctcactttcaaggagagggactccatagatgtgagtcctaggaagtgtgactcattgggggctattgatgtaatcatctcccagtttggtttcctgattcttatggctgtcgctgccctgataccgaacttggcacccccgttgctcaaagtcttagggacctgccctactctttctagaactttcaaggactgaaactcttcttttcaggctttgtcctcttggtagctatcaaataccttgctctgtcttgctggcacaaccattgatttccccatgaagttttctggaggctgtcctaggcctttactatgctcctggcttgcaaacagagtcctgaatgcattgaggtatacgggatggtgtgccaaggaggtggggaactgtgagacatatacatgaatcatcttaccccaaagttgattttacctgaaaataaagattttcaaaattctcatttcaatcattatatttttatatgaattaacgtggttatattatgaaataaaatatgaggttctattgaattttcaagataaaacacaaggcttcaagaatatttaaagcttagtcaggctgcttgaagctatactcccagattcctgggccaggggtatattctcccatgtcactgctggcctgttcagtttttgtatcagaaactctcctactggtcttgcttatcatgccatccatccatgtccagattagcctatactgtggccttggccttggtgatagtgcttataaggcttgttgtctacaccagttttcctgtaaagggagaaagctctttggtgaaggaggaggaaatgtacattgtttctgtatcctcattctgggactcaaatcttgttctaaactttgctccattaaaaccagaccctcctacttgctctgtgtacttctcttgccacttgcttttctagcctttcaatatcactgaatactagagtgtattgctccgaatagaagccccagaggccagggattccctcctctgttgctgtctttagcatggctgagggcctcagtagcgctgagctttggcaattgctcatttctaattatctggtcttttgcaaagtccacaaggctgtactagtccacaggctgagtctgttactgtggaccccagtcctacttcttcaatagggaaagggtagtgtctggagagctcagtgctgaattttaggtaggatgttgggagtgccagcaagctttgcctcctctgtgcagttaagagctgaccttcagctctaaaccagcaaggatgatgaagcttcctcctgagggggatggcatttggcataaaccatagttagtgcttgctaggggttacagttgccatgagtccatcgctgggctccgataagcctttaagtaactgcagaggaataaagctgttctttagcataagttccatggtgtgtatgtatgtatgtaaatattttaaattcaatcttcttttatctattaatttattttgagttgacaaataaaaattgtgtatatacatcatgtacaatatgatgttttgaactgtatatagtggaatggctaaattgagctaattaacatatgtattacctcacatactaatttttgtggtaagaacacaatctactctttttttttttttttttgagacagagtctcactctgttgcccaggctggaattcagtggcaccaccttggctcactgcaacctcagcctcccgggttcaagaggttctcctgcctcagcctcctgagtagccaggactacaggcctgcaccaccatgcctggctaatttttggatttttagtagagatgggattttaccatgttggccaggcttctctcgaactcctgacctcaggtgatccatctgccttggcctcccaaagtgctgggattacaggtgtgagccaccgtgcccggctcacaatctactcttttagcaattttcaagaatacaatacattgttattaactatagttgccacattttacaatagatttcttgaacttatttctcctaactgaaattttgtaccctttgactgacataatccaatccccaccaccccacccctgacaaccaccattctactttttgcttttatgagttcaccttttttagattctatgttaagtgagatcatgtggtatctcatggtatttaacttctgtcccatcttcattgaaacccagggaagaatacttgtactctttgagttgtcgatgccttgcctagccagtctcctgaaagaacgcagtattttggactttactgaagccctcagcacttttgatgttgttctgattaagttttcaaaccctctgaacttctctcctagaggttcatagtgctgcagagacagaagaaccataagagcttaaacattcttttcccacccatagtgctgtccctttggatgggcagctttagagccaagccctttgtgagcacaggctcaggtgtttaccacaaaccctgttttaatacttctgtgtctagcattcatcttatctcagggcctttagctgggtgctctagggctagggaactcaatactaaacaacatgtcattgacaaaccagagaccagcagaactggattcaagcctgatgtagttacagaagagccctcatgcatagctgaatgcttttctcactaatcttctataggaatgtatgttttgagttctcttgagagagagccagaagttcacctgccacttggaacagatttagagcagagctaatttttgccctttagtgaccactgaagagtcagtgttagtgcggggttgcctgttaaccccatgtggtgatgtacagcattgtctgaggacccatcttggagggaccatgtgagattccaaaaaggactcaagactcagttatggttttataatttcaaggatcagtatactgtaagagtaagggttctgctgtcagacgaactgatttgagatagcatttcccccatgcattaactatgtaactttgagcaagttacataatctcttggattctcagtttctcattaatatacatgtggtaatagcagtactacctcaaggagtgttaggtgggctaaatgagatgatgagtctggcatccctctataatccctgaaataataataacagcaatagcattttttttggtgcaacttagtataaggttggcacagtattaagcacattacatgctttacatacaaagaggctgtattactatctccagggtaatgttagatgaagaagctgaaacttttgcctaaatccaaggtctatgctcttactcttgaccaaagaagaggtacctctgtgtcctggtagttctatgccataaaactggctacaggaacttttgagaatataatatcatgaccagtctggctcccttaccagtttgttcaccaactttccaaggtggagcagatctctattactgataagattagctctgccccagactccactgtaatcaaggagaaaataattagctccaagccgagagacatctgcccgctgactccactctgactctatattgaagttatgatagaagccctcatctttcaccccagttctgataactggatccctgtcatatttccttttgtccccacaccaaagttcctcaagagtcatcctccattgattgctaatccaagaaacttcttgatcacttatctatctagacatcagtctgcccagcattcctcctatggcatggaaagtggtgcttagattcttagcctgaagtgacttttccatccattcattaattaattcattaaataatatttagtgaacatgaccactgcattcctgatctcaagatacaaggtcctttaaccaccctctcttttagaactgtctcgttacttgaacaaactctcattctaatagttcctagttctgccacaacttcattcttccctttgctttctgcaaatttcatggacagccaacaatcttaggatagaaaattctcaagtggttgctgcctgtccaccttggaaacttgagctccaagggcagctctaatcactggtttcatcacagaaaaagaagtggagctgaataaagcagctgaggttgaagtccattgtgttaactcaaggaaaacgtttttttcgtttctcgcttgttttgctcacaagtataaagacaaagaactactttaataggaagtttcagtcacaaagaaatttcacaaagaaacaaacccaatactgtactttggttgataagagaggtttctaacacacagagaaaatgcactgggggcttctcttttgttgatattgtgccctaatcaaaatatcttgttagattttcaataagaatgctccatggctatatttgccaaattcatttctatatttaacagtgtcatagcaggtctctaaaagatagatttcatgcaatatgttagtgtgcccttggaatgacaaaccaggtagttaagttgattaatggaggatatgtttattcactactttgaataaaacacagtcagaggggtcaataagtgaactcttcgtggaggccagtgttatcacctctattaatatattaatactatccattccttgcttgcctcactaatcaattttttttaatattagttttcaggccaggctctttctcaaggcttgtccaggcaaacatgataaagcacaggttccaatcaaatgacgatcatggttggtgtaaactctcttgcaacacattaagcagagcctatgggaaagaacttgcctagcaggaaaataaaggtgcagccaaggacacaccaagcctttctgtccttcttttagggaaattcgtgcactgttacatctcactcggttcatattatcttcaaggatctgtacagtcagtgaacaaagttctcttgaacaagctaatttcaaggttcacagattatccaaacaccatttcttttctggactgactgtatgcttccacctttatcacagtgattcacacttccctgccagtggacgtgaattctttattttgcaggagggaagaaggctggttgggtatgttgggggccaggtaaagaatcagtaagttggccgggcgcggtggctcacgcctgtaatcccagcactttgggaggccaaggagggcggatcacgaggtcaggagattgagaccattctgcctaacacggtgaaaccctgtctctactgaaaatataaaaaattagccaggcgtggtggtgggcgcctgcagtcccagctactcaggaggctgaggcgggagaacggtgtgaacccgggaggcggagcttgcagtgagcagagatcgtgccactgcactccagcctgggcgacagagtgagactccgtctcaaaaaaaaaaaaaaaaaaaaaaaagaatcagtgagtcaataatgcaataatggatccttctttctctatttaaccacaagggatcattcggttggaagggtaatggtgattaatcaaagtcatcaaactaaattcccttttctttgtgtgtgtgtgtgtgtgtgtgtgtgtgtgtgtgtgtgtatttctggcagcactggacctcactcccacttagcaaccattgacttttggtgtgaattggccgcctcctgtggatgaggctgaaatcctccacttttctacaatcttcctgcttattgctgtcccactcctggtcctcttcatccatttacaacacctgccttgccccacttctggagactgtgaggttgttcacccctgttttcacactagaaccctggtgaggttctatcaggccaaactccaacttttagaagcctagaaagtaagatgctcatgttggaaatacttccgaccctgtgggcatccctagcagttgatgataagccctgcccatgttcctggcgattttcagcatgccccagcccacatccatctgcgaatgtctccatctctgtacctgtgggcattttcttccagattcgtatagtttgctctggccattcacttgctaatctgcttcttttttccttatttcaattttatttatttatttcactgatacatagtatttgtacatatttatggggtacatgtaatattttgtttcatgcatagaatgtgtaatgatcaaatcagggtttttaggatatcaaccatcttgagcatttatcatttttatatgttgggaatatttcaaattctctcttctagctattttgaaatatgcaatacattgttgttaatcatagtcaccctattctgctatttaatattagaacttaatccttctatctaactgtatatttgtacccattatactatctctcttaatcctctctgcttctgtttgggatggtcaaggtgcttaattttctctttccagcttctcccttttcttggattttctagtgaagctatttttaaatgggttgttttgaacacatagcatccaatgggaataaacaaaatctctgctggccaggcatagtggctcacgcttgtaatcccggacctttgggagacgaaggtaggcagatggcttgagctcaggagttcaagaccagcctgggcaacatggtgaaaccctgacgctacagaaaatacaacaaattagctgggcatggtgatgcgcacctgaagtcccagctactcaggaggctgaggggggaggattgattgagtccaggaagttgaggttgcagtgagccatgattgtgccactgcactctagcctgagcgacaaaatgagaccctgttgcaaaaacaaaacaaacaaacaaaacctctgctaatgacttccaaatgtatatcttcaacggtgactctttttaatctccatactcatatatttaattgccttgaatttccagttgtattcatcacaggcatcacaaacacattattttgatttttccttccaaagctgctctgccccaaccccactcactgccccagcctgcctcatctcattaaattgcaccatttacactgcattaagttgctcagatctcaaacctaggactcattcttgattcctctcttatttccttcctcatcatatgacgatctgttggcttactttcaaaacgtgtgtcaaatatgaccacttctcatcacctccactgctacacctgtcattcaagataccacctatcatctctcactaggatgattgcaaagactcctaagcttccactgtttttaaaaattgtaaattgaaaacttagaattatatacaaaatttgtgggatacaaagttatgttataatttatgaatataatgtgggataattaaattaagctagttaacatatccattacctcaaatacttagcattttttgtggagagaatatttgaaatttacttccttagcaattgtgaaatgtatgatattctattattaactacgttcatcatactgagcaatagaactcaaaaaagaaaaacaaaacatattctttctgtctgagattttgtaccctttgattctcatctccccatcctccccattccccagcctctgtaaccatacttttcttctatgagttcgattatttcagcttccacatataagtgaaaaatgtaagctttcattcttgccccactttcagtatgatcttatagccacagtgatcatgtgacctgcttgcttaaaacccttacatcactttctgttacatacagagccatgtttacaaggcccctgtgatcttttaaggctcattttccactattctttccctcattcatgctgctccagctacactgtctcaaacatttcaagattttcccatctcagaagctgtgtatttctccttttgggcatgttcttctcttgggcatgcttcttttcttggttgtccttccctcatacctttgcctggcttgctccctctcacttcacttgggtctcagctcaaatgtcttcactctttcagaaatgtctacataaccacatggccataaataaatatattgtaaaaacttgtttgtattttgttttccccatggaaataagtcccaaattgtcaagaaccttgtttgccttgcttattagtattccccaacacttagaacagtgcctggaacatattatgcttaaaaaatattggatggatgaatcaattcattgatatatactaaagtgagaactaaagtgaattgaattaaatcagcaaagctctcaagcttggcttgaatcaatgtttggagaatagaagaatgaataaggaagaagacaatttcattagcttaggtagctactttctaacctttcccatcttttaattgaaaggctggccctacaatataatagcacttactgataacttattatatccaaagcattagagtggggaatacaaaattgcatcagacctgatctcaaactttttgtgtatgtgtgtgtgtatataatagagacaggtttaatcaaagaggagtaagaaaacttctgatacaaactataggtactcactgctctataattagacctaattcataaaaacttgtaagatattttgcggtgagcagtatagctttaggacagagcttctcaatgagtttgctagttgcaagtttgcctcatgagtagccgctttcttttactaaaactaacacaaacatattaaaactaaaactaaacactgcatataaaaagagtgggaagcaatgcagcttcagaggagaaagagttctgtttgggcgttggctaaagtaatctttctgggaccttatagggctacttcaggcatctatggcattcaaactcaactatggcttttgctgctccctgttttaggagaaaatagtgcctcagtgatgctaccttaaatttcttactttctttctttttgtttgtttgtttgagaaaggtctcactctgttacccaggcaggagagtgatgttatcaatgtcaggtatccagtaatgacatagccgaggctacctcctgtcagaggaaattcaccaacctgagtcttcggctttttgcagcatctttctgttgttcttggagatgctatctagcagttgaaaatatagtagagtgaatgcaactctctccagccattccaaaggcacaaacttttctcactcttttttttttttttttttttttttagctttctacagctttaatttggtttggatcccatgcccatgaccctgccaactgacaattctaggcatgcgcaaactggccccaaaaattcctcccacctttccaaagaactatttggcactttatgtgaagtacctggtttttccattttctttcctttttattattattattattatactttaagttttagggtacatgtgcacaacctgcaggtttgttacatatgtatacatgtgccatgttggtgtgctgcacccagtaactcgtcatttagcattaggtatatctcctaacgccatctctcccccatccccccaccatgcaaccatccccggtgtgtgatgttccccttcctgtgtccatgtgttttcattgttcatttcccacctatgagtgagaacatgcagtgtttggttttttgtccttgtgatagtttgctgagagtgatggtttccagcttcatccatgtccctacaaaggacatgaactcatcattttttatggctgcatagtattccatggtgtatatgtgccacattttcttaatccagtctatcattgttggacatttgggttggttccaagtctttgctattgtgaatagtgccgcagtagacatacgtgtgcatgtgtctttatagcagcatgatttataatcctttgggtatatacccagtaatgggattgctgggtcaaatggtatttctaattctagatccctgaggaatcaccacaccgacttccacaatggttgaactagtttacagtcccatcaacagtgtaaaagtgttcccatttctccacatcctctccagcacctgttgtttcctgactttttaatgatcgccattctaactggtgtgagatggtatctcattgtggttttgatttgcatttctctgatggccagtgatgatagcattttactgtgtcttttggctgcataaatgtcttcttttgagaagtgtctgttcatatcctttgtccactttttgatggtgttgtttgtttttttcttgtaaatttgtttgagttcattgtagattctggatattagccctttgtcagatgagtgggttgcaaaaattttctcccattctgtaggttgcctgttcactctgatggtagtttcttttgctgtgcagaagctcttgagtttaattagatcccatttgtcaatgttggcttttgttgccattgcttttggtgttttagtcatgaagtccttgcccatgcctatgtcctgaatggtattgcctaggttttcttccagggtttttatggttttaggtctaacatgtaagtatttaatctattttgaattaatttttgtataaggtgtaagaaagggatccagtttcagctttctacatatggttagccagttttcccagcaccatctactaaatagggaatcctttccccatttcttgtttttgtcatgtttgtcaaagatcagatagttgtagatatgcggcattatttctgagggctctgttctgttccattgatctatatctctgttttggtaccagtaccattttgttttggttactgtagccttgtagtatagtttgaagtcagttagcgtgatgcctccagctttgttcttttggcttaggatttacctggcaatgcgggctcttttttggttccttatgaactttaaagtagttttttccaattctgtgaagaaagtcattggtagcttgatggggatggcattgaatctataaattaccttgggcagtatggccattttcacgatattgattcttcctacccatgagcatggaatgttcttccatttgtttgtatcctcttttatttcattgagcaggggtttgtagttctccttgaagaggtccttcacatcccttgtaagttggagtcctaggtattttattctctttgaagcaattatgaatgggagttcactcatgatttggttctctgttagtctgttgtcggtgtataagaatgcttgtgatttttgcacattgattttgtatcctgagactttgctgaagttgcttatcagcttaaggggattttggactgagacgatggggttttctagatatacaatcatgtcatctgcaaacagggacaatttgacttcctcttttcctaattgaatgccctttatttccttctcctgcctgattgccctggccagaacttccaacactatgtggaataggagtggtgagagagggcatccgtgtcttgtgccagttttcaaagggaatgcttcgagtttttgtccattcagtatgatattggctgtgcgtttgtcatagataactcttattattttgagatacgtcccatcaataccgaatttattgagagtttttagcatgaaggggtgttgaattttgtcaaaggccttttctgcatctattgagataatcatgtggtttttgtctttggttcgtttatatgctggattacgtttattgatttgtgtatgttgaaccagacttgcatcccagggatgaagcccacttgatcatggtggataagctttttgatgtgttgctggattcagtctgccagtattttattgaggatttttgcatcaatgtttatcaaggatattggtctaaaattctctttttttgttgtgtctctgccaggctttggtatcaggatgatgctgacctcataaaatgagttagggaggattccctctttttctattgattggaatagtttcagaaggaacggtaccagctcctccttgtacctctggtagaattcggctgtgaatccatctggtcctggattttttttagttggtgagctattaattattgcctcaatttcagagcctgttattggtgtattcagagattcaacttcttcctggtttattcttgggagggtgtatgttttgaggaatttatccatttcttctagattttctagtttatttgcgtagaggtgtttatagtattctctgatggtagtttgtatttctgtgggatcggtggtgatatcccctttgtcattttttcttgcgtctatttgattcttctctcttttcttctttattagccttgctagcggtctatcaattttgttgatcttttcaaaaaaccagctcctggattcgttgattttttgaagggttttttgtgtctctatttccttcagttctgctctgatcttagttatttctttccttctgctagctttggaatgtgtttgctcttgcttctctagttcttttaattgtgatgttagggtgtcaattttagatctttcctgctttctcttgtgggcatttagtgctataaattttcctctacacaccgctttgaatgtgtcccagagattctggtatgttgtgtctttgttctcattggtttcaaagaacatctttatttctgccttcattttattatgtacccagtagtcattcaggagcaggttgttcagtttccatgtagttgagcggttttgagtgagtttcttaattctgagttctagtttgattgcactgtggtctgagagacagtttgttataatttctgttcttttacatttgctgaggagtgctttacttccaactatgtggtcaattttggaataggtgtggtgtggtgctgaaaagaatgtatattctgttgatttggggtggagagatctgtagatgtccattaggtccgcttggtgcagagctgagttcaattcctggatatccttgttaactttctgtctcgttcacctgtctaatgtggacagtggggtgttaaagtctcccattattattgtgtgggagtctaagtctctttgaaggtcactaaggacttgctttatgaatctgggtgctcctgtattgggtgcatatatatttaggatagttagttcttcttgttgaattgatccctttaccattatgtaaccaccaggcctgccctaaaagagctcctgaaggaagcactaaacatggaaaggaacaactggtaccagccactgcaaaaacatgccaaactgtaacgaccatcaaggctaggaagaaactgcatcaactaatgagcaaaataaccagctaacatcataatgacaggatcaaattcacacataacaatactaaccttaaatgtaaatgggctaaatgctccaattaaaaggcacagactggcaaattggataaagagtcaagacccatcagtgtgctgtattcaggaaacccatctcacatgcagagacacacataggctcaaaataaagggatggaggaagatctaccaagcaaatggaaaacaaaaaaaggcaggggttgcaatcctagtctcagataaaacagactttaaaccaagaaagatcaaaagagacaaagaaggccattacataatggtaaacaaacttttctctcttttttgagagaattacacaggggattaggaattatatgaattttgttgtttaacaagaagccctcccctttctctcctttcaaatttctcctcttaaatttctttatttttcttccttctcctttatgtttgccttttctctcttcccctgctcttcctgtcttcttttcatcctcctcacctctgtctgcctttttcccaactctccttggaggtggtggttcatgatggtcagtgagtaataggcagtcagagagatgaattccaaaatcaactgtggggaagcaacccacacaccacagtgatgcttttccttcctttctccttgcacttctcccctggatgaaccaaggacttgggtttttctgccagtgctctatgatggagtacagttggagaaggaggaaataggaaagaaatggggcttgatttaatcacagcaggggttcacttgtcagaatatcaagctaatttatagcattgtgacatggaacatcacatttcagaacacagaattaaaatcagtaggatctcacggttgtccaggtagggtctttctgaggaggggtcctgagggggcattgccaccacccatctgcattgttgccagaaaaatagctgtttaccagatttataaggctgaatttgttttggttgaattccacatgcctggtaaatgtactagtctggcctggttgtcccgagggaggacagagcacactccataagctgtgactctagagggaactgggctggtttcaagaaagtcctgggcctgaccagtgagcaagatttagtgttttcttccatgtccttccttgccctccaaagttcaggtaagtgactagattcacaaacttatttcagaatgccaggaggagactcatggaatcatagaaacttacaactgcaagggactttaaagatcaccgaccccactactgacttatgttccatctttcttctctgcttctggcctctgcctgagcagtgacagggaacttccaagttcctgagatagcacatctgatatttataattttagagacagctctgacaattggaaagctcttcttcatattgagtcaacatctctctgggctaaagtttttcccactggtctctctcgagctcttctgggaccttgtgaaacaagtcctgggtctgtctaaaaagaaactggatctccaaaccttccaaagaaattaattttctttctttttttaatttaacttttaagttggggtacatgtgcaagtttgttatataggtaaacttgtgtcatgggagtttgtcatacagattattttgtcacccgggtattaagcctagtactcaacagttattttttctgatcctctccttcctctcatcctccactctctgataagctccagtgtgtgttgcttccttctttgcattcatgtgttctcatcctttagcttccacttataaaagagagcatgtggtatttggttttctgttactgtgttggtttgccaaggataatggcctccagctccatccatgttcccgcaaaggacatgatcttgttcttttttatggctgcatagtattccacagtgtatgtgtaccacatttcctttattctaaataccccttgatgggcatttgtgttgattcaatatccttactattgtgaatagtgtacatatgcatgcctgtgtctttataatagagtgatttatctttctctgcatatatacctagtaaggggattgctgggttgaatggtatttctgtcttttggtctttgaggaattgccacagtgtcttccacaatggttgaattaatttacactcccaacaacagtgtataagcattcctttttctctgcaaccttgctaacatctattattttttgactttttaataatagctattcaaagaaattaattttctaaggtcctctctagaaatagccttaggtcttgaaactgacattaaacaaagtagttgaagccaggtgtactcagtgagtttaattagaatggcatgattctctttcttgaatgttctcattattttttagaagatggcatgaaggcactcattattattattattattggtttaaaagtaaaggccccaaaatagattcaacagagaaaaaaaattataagaagattctttcctccaaatgatagtctttttctgggctcctttctgatatgattttggggcattgattaaaaaaggttatagaaacaagacacagctctacttgatcaaggagcaggaagtcataaattttgtatattaaaagcattgggtgtgagaggattaaattccttcagctactggatcaaactggagaggagagctctaaacaactttcaggtgtgagcaagaaattctgcaagtcctcttaggtaaggaggcactttctactttatttctcatcatttatgtgttcaacaaatgtttgttaggcatcagtcacatgttgggctctgtgctccaaatatgaatgggggcttaaggagggccatgttttccttttaccttctgaggctttacttgaaaccagttttgtcaactgtgctgataggtttggatgagattcactgtttactaatggcttttctgttcttatcaccatgaaaatgcagccagagccagagttttattggcttactttcaacaatggtaatattttttgattcatcaaatggagcccctaaatccaattagccatctggcttaacttaatttttgatcaacttaagtgtgaattcctttttttaaaactaatgttctttatttttttaaaaaacttaagctttcattttaggctcaagggtacacgattaggttttttatatacatgtgaatatacctgcttataattacttatctgtagtatatgttcataaaaccatctttaatgcttcaataccccttgaattttatgactgaaaaagaaaatatgttattaatctttggtattgttacaaaaataaatgttgagccttgacaatccttggagtgtccaagcagtgagtttctgtacacattgatgttgcctagggaaacagagtatctggaaacagaaatttgggtttggctgaaggtggaatgggtgaaatagcaactgggttctggggagaaccaagagccatatgttaagatgtggttagggaaacagatgcccttctcataaatggagatggtctgcaagttgccttcctctgggaaccaaggtttggtttcagccagaaatagtggtatgtaaatatcctgattccctcatgtgcagagagagaactaagccagtaaatacagagccttttttagtcagcagaaggcaaatgaagactcaactaaatgcgttacctaaatggaaatgtgaatttagtttgcaaaatgctataaaggtgctgccattcagcatgacaagcagaaaagatgatttaaaaaatgaaatcctttgctttattccatcaaggcattcaactagcaaactcttcatataagtgtgcagagatggaaatgggagaagtgcaggtgagagcgcttgggatttgtgacccgaattcacctttggcagcttgcggtccttaagttgccaagtgttctgggaccactatctctctatggcctcccttcccctttccattagctctctgcatttttcttatattttacttctatgcgctcaaaggtctggaatctggggatgtttgtagaagagttatggttcaatcaggtatgttggggaagaaatagtttgctatttgaaagaccatgcctcaaattgttcttgcatgattttcatttctaattgtgaggacatgaaaatatcctgtgctgttcaatacagtagccactagccccatgtggctgtttatatttaattttaaagtaatttaaatcaaattaaaatttcagtgctttggtcacattagctacaattcaaatattaaattgccacatggatggtgaatatttagaacatttccaacatcacagaatgttctgtgccacagcactggtagactgcgtctactggtttgctgccaacctcttccaatgactaacatttgttgtgtgtttaacttaaacatgtattcctaataacaaacatcttactcattttaatgacatatagactatatcaacggtaggttttgccctacttctttagagtactggcctgaaggaactaattcagtgcatttctctggttctgctgacctgctgacctcttctgatggtccaaggtgatctctgatgaagtcttcattttctctctctgacatagcctttgtcatttttacctttaatgacatttaatgtcatttttacctctacttatttactgttttttaacaccatctgttctttcctctgtttattctttttcatcaactttttaggccttttctctcttctgcatattcttgtgtatatttttatacgtaaaaaatatttcctgtctgcgcatggtggctcacacctgtaatcccagcattttggagggctgaggcgggaggatcacttgaccccgggagttcaaggctagcttgggcaacatagggagatcccatttctactaaaaaaaaaaaaaaaaaattaaggccgggcacggtgactcatgcctgtaatcccagcactttgggaagccaaggagggcaaatcacttgaggtcaggagattgagaccagcctggccaacatggtaaaaccccatctctactaaaaatacaaaaatttttattagaggtgtggtggtgtacacctgtagtcccaggtattgggactacagtgagccatgatcatgccactgtactccaacctgggtgacagagcaaaaccctctcaaaaaaaaattttctttcagaaaagtttaagaactttaaatatatagaaagggtatatataatgtgtatctataaataatttaagaaaataatataaagtatacttacattcttatcagctagctaaagacctagaagactactcctacattacatgttttctgtacgtctctccttctgtattcccttctcaccaagtggtaaccattattctaaattttgtgttaatatttcctctgatctttaatacctttattacatatatgcttatctctaaataatacaacatatatttttgcccatttttgaactttacatatgtggaatcatgctgtgtacatttttctatgacttgcttttttggctcaacattacatttgggggattctttcacttgaaatgttattctatgagacttagttctttcactcgagattatgtttttgagaataattcatgttaatatgtgcacatgtagctcatcgttttcatatctgtataataatccattgtttgagtatatgcagcaatttatttactggttttactcttaatgggcatttgggttctctgcattatttctttcactattatgacctgaggtactatggacacactatttttttccaatcagcttcctcaggttaaaggacattcttacacatctcttgacgcacatgtgcatcagattcctaaaatatttacccaatggtgcccacccaggttaaggatgggtctgcctttcccagcccactttctttgatcttttttctatgcttatttcaccttcatttctcccctcatctctatactgcataatactctccatttgctcattcactaaataaaaggaagaattattttatcctcaggaaagtgtcattttggatgaaaaggactggtatatatcacatatatatatcctatatatatgtgtgtgtgtgtatatatatgtaaatatatatgtgtatatataaatatatatgtgtatatatataaatatatgtgtgtgtatatatatatatatatataaaaataaaaggaagtttattaagtattaactcacatgatcacatggtcctgcaataggccatctgcaggctgaggagcaaggagagccagtccgagtcccaaaactgaagaacctggagtctgatgtttgagggcaggaagcatccagtacaggagaaagatgtaggctgggaggctaggctttatattttaaacaagctggcagctgattaaatggtgcccacccacgttaagggtgggtctgcctttcccagcccactgacttgaatgttaatctcctttggcaacacccttaccgacacacccaggatcaatactttgcatccttcaatccaatcaagttgacgctcagtattaatcatcacaactggcttcctggaagtactagggagtgacgaaaagacagacctggttttgaaacccagctctcctcctgttagatgtctctggccattggctagtcgttagttaacctcattgagcttcacttccttcatcagtaaaatgaagggttctaaaactttttttcagagagtagtgtgaagattaaatgaaataacacatgtaaagccttcagcacttggcatggtacatagtaggcactcaatatgtcttggttttttttcttcgtctttgttagaaataaaatatttcattatctacactacaccttacaagcaaaaggccagactcgctgtctacttcaccgattagtagccagtaaagagacagatggaaatgttttaggacttctactcattctctctcaatgcctcttattgaccctctactccacgcccttgttcttgtcaccagtgggctggaagcacataatcagggtcatcagtatgtgatgcaggagcatcagtagccaccagtctagtctagcacacaggagagagtgatgaggcagtgaggtgaacaaaacaatgtcatacagtcttggatgtttgttcagacctaccataattcaagacatatgcggatttggagtagattatgattggggagttcctttcaggagaggtgacctctaaaaggtctatgctggtcatcagggcttgaaaacagccaatgtgagggtcactgacaagggtttgcatttgttcaaggagctttgcctctacagacttgataacctttctatcttcctggaaatgagcttatggctatggctcttcaaaggcttggtattatgaaggtatggtagctagctctggatagaggggtgctggctctacactgggaagcactgcctcataggcaagctgtgatgaaggaacttggtcacaggattagagtgtggacgctttcattggaagaaagtagagagttggggcaaacaaaatgagctgtgtgggatacacagcataagaatattctagtcaaatccatgataattttagaggaaggaagaaagaagatgcttgaataggatagatacaagagaggatgcagtaaagaattacctgcccttccagtgtacaatcaacaaagaattctgggtaagttagttaacaaccgggattgatagaattgggtaattattatgaaaatgtatgttggtgttggtttaaagtaaaataaaaagaaataaatattgtaagtattaacacctggaggcaaaatagaaatgctaaaataagttagtgacaaagtcaggagaataaacgtcataattctacatttaatagattaagaagaaactagaaaaaaagcaaatctatgccaattaaggaaagatgattgtaaataatttaccatcattatttcttatatttgtgaaggaaaatttgatgatcagtgttatggaaaaaaatcacatgtactatgagttcattttgtctatcatttaaaaatgaaaaaaagaaaaaatttcattcataattccttttattcttatacattaccaaagctacaatacggtctaaattttcaaactgtgagttgcaacccacctagtgggtcacaaaatcaatttagtgggtcacaatgagcattttgtgatatttgtttttatttgtattatggggtgtgtgtgtgtgtgtgtgtatgtatgtgtgaatttgtgtacagtgggtctaacgttgaaaaagtttgaaagccaccaacccagataatttcccatggacccttctacttctggtgtataataattctgtatgttaaacaaattgagatgaaaataattttataggatttcttgtggttctttcatctgtgaatagtactagtttctgctgagtggaatttgaattaaggtatctccatttcagactgcaaaaaaagtgcttaattattaaaaaaccaaataaagaagaaacatcagtggtctcatctttaagatagtccaaagttgtggagctggtagccacaattaaggggaagctccatgttatgaaaattttattctttcttcctttttaagatatagggtcttgttctgttacccaggctggagtgcagtggcaccattatagctcactgcagccttgaactcctgggttcaagcgcttctccccccacagcttcctgagtagctgggactacaggtgctgcatcacgcccagctaattattatttttgtttttttagagatggggtttcactctgttgcccaggctggtcttgaactcccatgttcaagtgatccttccgcctcagcctcctaaagagctgggattacaagcatgagccactgcacctggtgaaagttttcctctgtatttctgttttattgttgttttttgtatgaatttatcagaataacccaattaattgggggcactcttaagtgcataaattagaataaatgtctgtattttttaaaagtccatttgatatgacagctattgcaaattttgcctttcttggtaatatatgtacgcataaactttgcaagtcatgattctttatacagcagaccgtacaaaattaacaagaatacacatgattgctgctggcttttcatacacgaatttaataaagaggagctcagtctgttcttccttattatgttgttttcctattatacataaaagccaagttttggacttgtgggaatgatgatgcagggcatcaccaggccaactctgtggcatagaattccacagggtgccgccaaggaggctgttgtggtgggaagtgagttgggtttccatataccctgtattgctcatgcattggctagaagttttggtgaacctcagaaaggttttttgatacctgatcacagtctggtgaggtaaatgagtttttttttgatttgcagccttaacaaaaattttattatgctgatgcttcactctgtgcacagttatgtgcacaccttaggtacacatgtcatgcttttgataagttcttatagttttggctattctgcactcacaaattttgcaaataaaaatcatagaactctaactacaattgactctgatacaattaaacttattggtataaagacggtaaaattataccttgagagaagttggcttatgtccaaataagtgtgtgcgcgcatgcgcgcgcgcgcgcgcacacacacacacacacacacacacatacacattgtgattctgtaggcagcttatatagaaataccatatcaaaagagatgtaacaggggatgaggaagaaaaaaaaagatacataacataacagcccttgaaacaatttgaggcttacagtgaagccatctttgctaccactactattttcctcctgatttcttgcatttcatcagcagtagtttttggcctcgtttcaacaatgctgaggtgacgattcttttctgctccaaactcttaacagctttaattaatagcacttattcagctcatgcttaggagttttatttttacaaagtgatttacgatcatttttattagttattctaaattgagattcagaatggcatgtcataaagaaaatgtttcatgttcgagaaaggagactattcctacccagcatttgtctaaatagcttaattatggctggattactcatagattgtttaattatttattccttaatctgtgaatgtaaatacaccactccaacctgcaattatggaaggtctgcaaacctgagttgtgaagttcaactgatatctgtaagaattcttgaggcaaagttgagtgtgcgtcactatcaaagaaaaaggaaattggaataattatataaattgttaggcactaatgcaatccaaagttagtagtgtgtgtaataaagccatgccacttagaaatcaactatcagaataatgttattatttttcttcatataaaagtaatacatattaatacaatatatattaatgtgcttgtaataagatcaaactggtaattggaaaatatcttttcacctgatatgaataaaaattgtcattaaaatatatatttctgaatcaaattttaagattttttatgtctagatcttttgcataccaaaatgataaaaattagcataagcaatattttatcattggctttgcacttactatttttgcatacattatagaatgtaatgtacaaattcatagctctgaaattaggaaatttgaaaggacatttaatattctaattacattaacttagtacataattttcagccagtttttgattattcaaagaccttctgatctttggattttgtgtaccttagtttgcctttggtgtctgccttttggatattacactacacatgtaagaatctttgtaagaggaggccttgagaagggagaaatgatgaaacagcgaccagcttctttgcttgctggcatctctaacaaggaaagcaacagtgggaagaggaaaataaaaccaactaagaaactctatagatcagggaagttaacacccacctgccttaaagccatattttcagttaaaatttccagactatcaaatgatgaaaaatgaatttcatgagatattccctgtttgctatggtgtttataagaggaagaaactataaacaacaactgaagtttatgggaaaagaccaattaaaaaatgagaatgtcaggcaaacacatccttgactctgtgtgtgtgtgtgtgtgtgtgtgtgtgtgtgtgtgtgtgtgtgtctctctctctctctctctttctctctcccttttatttttattttttaggaacaagtaatataaacatgtagccacacagcatctccatagatattaaatatgataaaaagatttacaaatgtacaactgtgacctgaatgaaagggcatgtctgaacacaacaaatccaattttctgcttacactggcaaggaaaccaactactgtgcctaaaaaagcagttcattttatcagctaaataaacagactaatcaacaccactgatcctctgctcccacttacccaaagctttttgaaaagctggaatgtttctcaaaggcaagctatggatttcagatgctgaattgaggttttaaataccccccaaattcaagtgatggtttctatggtgactttccctcagccacttacttagaatggcaaagggcctccttttgaaacatcaaattcccaagtccctttagccttgtagcaatgagccgaaaaaggaatgactgactttgagcagggtatttggtgttggcaggcgcttcttctatcaatatagattttgatttcccatcagactggtttctggatattctactaggacttcatctctctttgccactcattgtgttcgtgttctgggtgagggcggaggagagtatgggtaaagtatgtgtgggccaccagcaagagatgatttagcttgtgtgtgcttttcagagtgcacttcacggagaatgggatgtgatttggagaagagagtgctgaagtggcgtatccctttattttcacctgggacacttaagggtccagtctttttgtccatgaaatacctgggtggatttcgcagtacttcatatctgttttattaaaaatatatgttgtttattaaaaaataaaataacaaagtgaaaaggagaaattgtaattataaaagaaaaatagagacacaaatttgtgtgtgttcatatatgtgtatatgtgtatagctacatatctatatctagataatgaaaatggtatcatgccttgcatatagcactcttctgcaacttactgactttttcctaacattgcattgtggatagctgaatggatagaccatagagttttaaccaattttcagggttttttcaattttttaatcttacaacttcaaacaatgatgcagataatatgtttgtataaatttttctatctctctctttctctttttattgacttgggtaaatattttattttttttaaatttttgtcttattgagacagaatcttgctctgtcacccaggctggagtatagtggcgtgatcttggctcactgcaacctctgcctcctggttcttgcaccttagcttcctgagtagctgggattacaggcatgtgccaccacacctggctaatttttgtatttttagtagagacagagtttcaccatgttggccaggctggtctggaactcctgacttcaagtgatctgccctccttggcttcccaaagtgctgggattacaggtatgagccacagcacccagctaacttgggtaaatattttctaggagaaattcttaaaaatggagttgctgggccaaaagtattacttttattattactgttttcattaaatgtgaagatacaatactttttgtagagccctgtattactcagtgatgatcaactagcctatataaaaatctgagcatagtttccaatgcatttggtttgatttttctacagcattctaaagttctattctatagttctatagttctattctatagtattctatagtttgatttttctatagtatttttctatagtatagttcagaaaagaaagatgtgtatttctgcaatttggaatctgtcataataatacctaacatttattgaatgcttactatgccagactttctaagcacttcacatctatttaattcatgtactttttacatcaccctgatgaagtagaggctatttgctaatgtgaaaactcagcgttagagaaactaggtaacatcaaccaaagatatgcagctggtaaatgaatgtgccaggattaaaacccatgtagtctgattctatagttactaatcttactcatgacccaatactctctcttcctggttgacaatctctgtttaggaggaactaaatacattccctattgttttatcttattcatgtgtctgggtgagtgttaactccaggctttttttttttcttttcaagaacacaaggacagccattataaatgccaaattttgttcagcgccatttgggtacttgataaaattgtaattcttctattatacattgagctattctcatgtggaacgctttcatttctatagcagtttagtagtaatcaaaggaacactcacagattcaggaaccagcttaaataatgaggagaagaaaccagaaataaggggaaatgtggacagagggaaaggggcggtaatatggagttgaggagggtattatgagatgggagatggactagatgagggatgaggaaaggtaggagcttagaaaaaaagaaaggaatgattaaaaaaaaagcaagcaagtaagcaaacattggtctaagaaagcaaatcaatgaagaggatttgactaaaaatatccccaccgaatagagtcaaaatacccccactaccacaaccaaccaccaccttataattaaaaacaaaaggatttgcactaatttttctttactggcacacattcctttcacatatggactagattataaaaatgaggcttcgataagttctgaaggaagatctacgtgttggagaagtaggttaccttcaataataaatatcctccagataaatataaaaaacttcaagatgaaaaacattgcaaataaaccgtattttcacagtactgattagggctctatgcctgggggctggggtatgtctgctgagggccagagggcggagagacttccagtgtttccaacttgactttcccttaagaagatgagttatgagtgagcccatatcagatgagatatggattctgatagagacattaacctgagcccttccccacaaagcaaataggcttctcactgtgcattaagtaaataatttgtgctatttccctaaagggaagtacagtgttatggagtcagaaaagttgtcaggtagcaatatgattatttcattaactctacacgaacacttattgccctagccaagcatcatcagctatatcctattgttgtgttttactgaggggatgatgtcagtgacagggaatgtggagacaagaaagtcgtctccagttgccgtccattaggtatagagttgatggttcactagacttccatagggcaggtctccagctattctcttttaatgatgactgttggctaaccttatttgtaattaatgaattgcctacatgtgtattcatttaatatttatctttcataggaactcttcagtaagcttcatgaggacaaagattatattatgttttgtgaactgctgtttattcccactactgagcagtgtttgacacataatatgctattaactgttgaatgaatgaatgaatgctgcaaaacagtgtaggagcctggcaggtgataaaagataattaaatgctgtaggtctaatattgtgtgccaggataactttgtcaagaccttttaagagatgaaagaaagacaacatgatgctgacagggaacaatgtatacctacatggattatttaatctgttctcagagtttatgaaaggaataaaatggtgtagaaatggatgtattcctctcctctctaattctgaccatactcctatcccaatctactaattgggtatagaattacagtgagttttgcaattccataggaaataatgagtttaataatgaagactattctagtgcttattttcatgccaagcagtggccttaattcaatcaacatcactttgaagaggttattcttgctcaccccagttgaagatagaatatagactgaggcattcaatatgtttggtggactgagagggttatttacaattattttggtgctgtaaattgtgtctttgcatggtcactgaactactagtaataccgtcactcccaccaccggcatcaacattgtcactaccaccataataagatcagttactgagataataagtaggagagccatgctttgaatccagggtggcctgactccaaagcgcatgccctttctgttgtgctcttgccacaaagtgtaatattcataggcaaatcctcctacagggagtaggacagttacatcctgtttgatggcaccactgtcaggtactcttaatcagacaattccaaggtttttgtggtctcagttcaagcctaagcagcagaactcctaagttcagtctctgctaacctttaactaatctcttattgctccttgtccttatcttttaaatggattcatagttcatgagagaggggtgtgaaccactaatgaatgtagaccacaggggagagtggattaaagagattagctcaggaaagaacaatatattatcactgtgaaagaacattttatctttgtgtttgattttgggtctaggtgtattaaaacccagaaaaagaaaaaataattatgataattctttacggctaccatgtgtggtcaaacttttattacgtaaggttagagagacaagacgcttaaggacccatcaaacatttatttgctatttcaattgtatttctttttcgcctgctctattgctcttgattttgttgtatatgccatgtttgggaacattctttttcactagaaccatgttcctaaaattgtactatggttcgtcatgaggaataattcaatctttgacacagactgggggtcagggagctagaaatcagaatcatacagatagaaaggaaagaactttttagaaagtgattggttgcacaaactggcaagaaaacaattttaggccaggttggtaacatcagatgcattatttggtcacaggggtagacagaccgttaatactttttatgaagttaatcttcacttttacttcatagtgagagtagttagggtgtgggctttatttttgtcattccagttttattaggttgtctactttaagtgaaatgggagtgtgcacttcatggtgtgtggcattagtgcttccaaggagtgtgccccaaatcagccacattttaatttagatgtatctgtacaaagtaatagactgctttgctagatattctagtcttagtatttctatacttccctttaactccaaaataccagatatagtctttggtctgttttcttctgctgtgatgtcacagagcagttttgttgcattccaatcattgatgtaatatgataagtgacttatctcagtcggcttcaacacagaagtttgggctgagtgaggaggcatggtatagtctaaaataaaacaaaacagtagatatatagacttactaagaagacctaaaagatattttcatcgataaatgtgattctgtttcaatatatttttattaatgtagtctgcctttagtctaaaccaggggttggcaaagtgtggccctctgtggccaaatctggtcacatccattatttgcatatcacctatagctgctttctcacaacagtggcagaactgagtagttgagacaaagaatgtatggctggcaaagcccaaaacatttactatctgactctttacagaaaaagtctggcaacctctggtttaaactaatttcttgtcctatttcttattaagtatacactcatgaaatataacaagcccctacattcaaactcttcagaaaaaaggaaaagcagcccgagtgtggtggctcacgcctataatcccagcattttgggaggccaaggtgggcggatcacctgaggtcaggagtttgagaccagcctggccaacatggcaaaaccccgactctactaaaaatacaaaaataagctgggcatggtggctcacacctataatcccagcattttgggaggccaaggtgggcagattacctgaggtcaggagtttgagaccagcctggccaacatggtgaaaccctgtctctactaaaaataaaaaaataagctgggcatggtgacgcatgactgtaatcccagctactcaagagagtgagacaggagaatcgcttgaacctgggaggtggaggttgtagggagccgagatcgtgcactgcactccagcctggggaacagagggagactctgtctccaaaaaaaaaaaaaaaaagcattattttgaagttcctcttattatagtacaccattaaaacatgacatagtaagtcccaaaataaaaatttctatatagcagctggaacattctaaggctttaaaccctaagtgtgttagtttactttgtggaaagaaatgaaaaaacaaaacaaacaaacaaacaaaaaaacccgtaagacctaaaaccataaaaacacccagaagaaaacctaggcaataccattcaggacataggcatgggcaaagacttcatgactaaaacaccaaaagcaatggcaacaaaagccaaaattgacaaatgggatctaattaaactaaagagcttctgcacagcaaaagaaactatcatcagagcgaacaggcaacccacagaatgggagaaagtttttgcaatctactcaactgacaaagggctaatatccagaatctacaaagaacttaaacaaatttacaagaaaaaaacaaaaaaaccatcaaaaagtgggcaaaagataggaacagacacttctcaaaagaagacatttatgtggccaacaaatatatgaaaaaaagctcatcatcactggtcattagagaaatgcaaatcaaaaccacaatgagatagcatctcaagccagtcagaatggtgatcattaaaaagtcaggaaacaacaaatgctggagaggatgtggagaaataggaacactttttcactgttggtgggagtgtaaattagttcaaccattgtggaagacagtgtggagattcctcaaggatctaaaaccagaaataccatttgacccagcaatcccattactgggtatatacccaaaggattataaatcattctgctacaaagaaacttgcacacgtatgtttattgcagcactgtttacaatagcaaagacttggaaccaacccaaatgcccatcaatgatggtctggataaagaaaatgtggcacatatacaccatgtaatactatgcagctataaaaaagaatgaattcatgtcctttgcagggacatgtatgaagctggaaaccatcattctcagcaaactaacagaggaacagaaaaccaaacaccacatgttctcactcataagtgggagttgaacaaagagaacacatggacacagggaggcgaacttcacacattggggcctgtcagggggtgggggactaggggacaggatagcattaggagaaatacctaatgtagatgatgggttgacaggtgcagcaaaccaccatggcacatgtatagctatgtaacaaacctgcacattctgcacatgtatcccagaagttaaagtataatgataattaaaaaatgaatttaactaataaaaaaaacattattttgaaattcttcttgttacagtacatcattaaaatgtgacccaatgagtcccaaaataaaaatttctatatggcagctggaacattctaaggctttaaatgctaggtgcgttagtttactttttggaaagaaatgaaaaaaaaaataatgtgagcacatgtagttactgttttttaggagcttccagaatcttaacattttgagcaagtaccaatattggtattatccacagagcataatagtgaaagcagaagtaaagccaagagccttgagtccagttgttttgtccataaaaagaaaaatttcctattgataatggatctgcaagggtaataagatcttattggtttactaaggagtgaaatgttattaaatagcagcactgttagagtcaggaggcagtggctaaaaaaactgctatcttgggaaatattgtttattgttaacacttgctgtactcacccatatgaaggagtgatcagccactaaatatttttgattgttgtagaggcaaaacaaattgactttattcactcaaaggatagcaggtcctaatccctaggaaaataatatacttttaaagtttagtttgttgcattaaaacagttttcaaatcaaggtattcttttgaaagaactatcttaataacaaagaccaaattctgttagttcacaggtctcataagaaaggtgaagagaaaatatggggtgttaataaaagaaaaaatacagtgtaaacaaaacagctttgtgttccaatgccctgtttggcatacataataattttatccataagcagtctattttatttgtagctctacttctgtgaacttagaggtatctgcaggaaaactgcttatggaatgtaaatgaaatcatgagatttgaaatatgcatcagggttttaaaatgtgtcttcctttgactctagcttttatgaaatttgaatacacagtactatcaaacttaatttttccaagaagaattaagtgcccaatttatgtctgagcttcagattccttgtctgtctcatagttaccactaacacagttatttaaacttcatttgggtaagtgaaatgacatttagtttaaaaattttgtttggagattgcatgctcctctagaatgtagggttgaactgtacaggcagataggattatagttcagatgtattttttccttgaatgtttgagtaactggctgatctgaataccactgctgcttgatgaattattacaaaacttagtaacttacaacaataagcattttattatgttcacagattctgtgggataggacagggcacagaaaaatggcttgcttattcttcatagtggttaggattccagctgaagagatttgagggctggagtgatttgatggcagggagtcggaatcatttggaggttccttgactcacatgtgcctgtgttgggaagacttgaagactagagctgctaaccagactacctacagagaggtggcttctccatgtggccactccaactagcttggcttggagccaagcaaggcagcattaggacaattgggtttcttatacagcagctcaagtctccaagcatggctattctggcaaacaaagtagtagctgcatcatctatgccacatagccttattccactgtgctgtattggtcaaagcggtcccaagtacatccagttttaaggagatgagaattagactctgccttttgaaaggggagtggcgaggtcacatcagagaagaggatgtggaagtggagatgttagggagaccctctttgggaaatataatctgtgacattggccaaagaaaaagtgagtatacaatcaggagaatgtaagtgttatgttaaaagtgaaatgttaacatttttgtgatgttgattatttattagaattggatgtctaatagacatctcaaacttcttatgttcaaaatagttttttctctttcctcaaaaatcgaaacagtgatttttgtcttccccactgttggtcttcaagtttctccatcttagaaaatggcaccatttccaaaacaaaatgtaggagtcacctttgatttttcttgttctttcaactcttacatctaatgtgtcaacaagttcacttagttctacctccaaaatgtctttcaaatttattcacttctctctatcttcagtcctcacccctgccttagtctgttttgtgctgctaaaatagaatacctaaggctgggtaatgtctttttttattttttgaaattatttatttgtttttttaaaatttttataatttttgtgaatacatagtaggtgtatatatttataggttacataaaatattttgatataggcatgcaatgtgtaataatcacaccagggtaaatggggcatctattacctcaagcatttatcctttgtgttacaaacaattcaattatactcttttttttttttttttttttttgagatggggtctcattctgttgctcaggctggagtacagtggtgcaatctcggttcaccgtaacctccgcgtcctgggttcaagtgattctcctgcctcagcctcccaagtagctggaattccaggcccacgccactgtgcctggctaattttttgtatttctagtagagatggggtttcaccatgttggccaggctggtctcgaactcctgacctcagatgatctgcctgcctcagcctcccaaagtgctgggattacaggcgtgagccactgcttctggcctcttttaaatgtacaattaaattatttttgactatagtcaaactgttgtgctagcaaatatcaggtcttttaaattctttctatttttttgtacccattagccctccccactttcccccaccacccccactacccttttcatcctctggtaaccatccttctactatttccatgagttcaattgttttgatttttagctcccacaaataagtgagaacatgtgaaatttgcctttctgtgcctggctcatttcacttcacataatgacctccagtttcatccatattgctgcaaatgacaggatctcattcatttttaaggctgaatagtactccactgtgtatatgtaccacactttatgcattcccctgttgatgggcacttaggttgcttccaaatcttggctattatgaccactgctgcaataaacatgggcatgcagatatctctttgatatattgatttcctttttttggggggtatatacctaggagtgggattgctgaatcataaggcagctctatttttatttatttatttatatttattttttgagatggggtttcgctcttgttgccccggctggagtgcaatggcacaatcttgactcactgcaacctccgcctcccagattctcctgcctcagcctcccaagtagctgggattacaggcatgtgccaccatacctggctatttttttttttttttaatttagtagggatggggtttcaccatgttggtcaggctgttcttgaactcctgacctcaggtgatccacctgccttggcctctcaaagtgttgggattacaggtgtgagccatcatgccagcctctatttttatttttttgaggaacctctaaactgttctccatagtggttatactaatttatattacataaaagccattttaattggggtgagccgatatctcactgtggttctgatttgcatttctctgatgatcgatgatgtcgagcaccttttcatatacctgtttgccatctgtgtgtcttcttttgagaaaagtgtatttagatcttttgcccatttttaaattggattacttgagttttttccttatagagttgtttgagctccttatatattctggttattaatcccttgtcaaatgggtagtttgcaaatattttcttccattctgtgggttgtctcttcactttgtcaataagactgggtaatttataatgaaccgaaatatattgtatcacaggtctggaggcagggaagtccaagatcaaggtgtcagcatgtggcaagggccttcttgccagttcagttctaagaatgaacttcccggattctaaatttgatcatgtgccacccttgtttataaatcttcagtagtttctgattgcacttggaataagatcttaattccttcctagacttacaaaaccctgcaagatttgtctcttgcctccttctccaaacctcatttcatcactactctctctgctcattcactgtgctctaccgtcaccgatctccctttgttcctcaaccctcaagtgcctttgaatctgctgttttctctgcctagagcacattccccaacatgctctgcatggctggatcctttaacgtgagctgttgcctccttaggccttccctgtccagccaatctaaatattctacctcattactctctcctttatcatcctatttatttctatagtagaaattatcttattattttatatgtttgtttacttgtttactgcctctcttatcaactagaagttaagcttcctgaagacagtggccttgtctatcttgctcatccctgtttcttcagtactttgctgaatcttgtgtataataggcattccataaatattttttgaatgaataaatgaaagacagtttaaaacaagaggaaaattacatgtttaagtctaatttctcatgaaaacttacccatattttactcaagccaatagctgaatataaaagatgacttttacatgactagtcacagaagaattaaaacttacaagtgtttttggtctcaatattacctatcaagggggcttttactataattgaacttgtaaacattattaacttcatttattaattgttttatttattcattcagcttttagtgagagcctactatatgcataggactgttctagagcagacaaataatgtaaaaatgcataagacacatttcctactttcacagagcctaaaatttagtggaggatataagaaacatataccaaaagcctcaatactggtgatggtgttggtgacatttaagtggcatagtctaaatgctatcagtatggaggagaggtctttagggctgaactaatcagagaatattgattaggccaacatttaaattggatattttaaaataaggcttttaataggtagagatgaaaattgaggaaataaagacattcctggtaaaatacatggcatgagcaagggactgggaccaagaaaataaaatacatgtttagaaaatggtgagaaatctaggctgagtggagaatcaaactgtgtatggggtcagtagcaaatacagctggttgaagccatgtcatgaaatgctactaactccaagctaaataacatggatttcattcaacagttgatgaagaattactgaagaactactgaaaaatttttgtttgttttgtttttttttttttttttaagaatggtgggaggttcatcaaaacagtgctttaggaaaattaacgtggctttgcgtgcaggctggactgcaaatggagagtgtggagaggagagtgtggatgttgggaggtcatactttatccatcaaggaccaagtggtgccaactttctttatgtacctcctacaggtagattgagaaggcacagtatagtagaaagagcataggcctaagcctagttacagaaccctggcttcgtaactttggtacttgagtgacttgaggtcagtcacttgatgtttctgagcctctgttccctcaattgtagaacaggggtaatttttatcctgttgtctagtttccatgggaattaggacatacttgacaacagtagctatatagtattattaatgattgaatgcagcattgaattcatttgcttaaacttttttagtattacgtgcggtgacttccatttgctttgactggtggtccatgctaaagcaagattatgaaagcagtttattagtacagcaccactatacctagtatgtaaattttcttttgcattctctgaaaaatcacctccatctacttgattactctggtctttattccaaatagtaactgcaatgtcagcagaagcttttgaatagttgtttctctaaatggaatgtcttttactcttgccaggataggcaaagtgttaaataaatagtcaatactttctgtattttaatttaatcaaagaagcagtaatgaaatttgagggctactggtggaggcagagagagttgtctataactcttctactttgttctgtttgtctcttattctttttcccttattagaatttattttaaataacttccctggactaggacaccaggctattggttccaagacatcactacacctatgaaaaaaattgagtattgagaagtaatgtggggttactttccttggatcaaagttacttaaacacttagatgaaagcttgagaggaaaggagtttacctatcaataattcaaaaacaatctccctcttccaattccttcttcaccattacatattctagcatagatattttctttttctttctttttttttttttttgagacggagtctcgctttgtcgccaggctggagtgcagtggcgtgatcttggctcactgcaacctctgcctcatgggttcaagtgattctcctgcctcagcctcctgagtagctgggattacaggcacatgccaccatgcccagcagatttttgtatttttagtagagatggggtttcaccatgttggccaggatggtctcaatctcttgaccttgtgatctgcccgcctcagcctctcaaagtgctgggattacaggcgtgagccaccgtgcctggcctagcacagatattttctgacaaatgtttgcagaatatgaatcttctttaagtttaagcaagtaaaaattgctgaatgaaaagagatatgttggcctttgccactaatttctgtgtaattctgagtaaaatgttagtttttttgtaaacagagataaaagtctcgaaatttaatttagggatgaagattactagcatcaggctcagtgcctagatatgaaacaccagcaccaccatcagaacaccaagaaaaagatttccctcctccgcttattttatcatgaaaaaccaaaaagctaaagtcacagtatcagtagtcctccccttaaccactatggatactttacaagatccctagtgaatgcctgaaactgtgtatagtactgagccttatacatactttgtagtactgtctgtactatgtttttctatatagtacattataaacaaataccatggtgttaccagtgcatgggaaattattaatgactttcaaaactatatgttgtatttctactgtgcaccccataggaaggactgcagatagaaagcacatacctgtgacagaaggtagaagaaaacaccattgaaactctcatgtgagatagctgtggcaaaatgtagtcaagataaaaaagaaataaaatcaaagtctagtatttccaaattccaaaattctgtttttggatagctgatatctcagaagtatatgtaggtattgatatcagtatatatgtgctctgtcaggttcagttgaaatgagagaagtagatgtaatttaggtgttctattgtgtggatgtccccaacaattatcttttattattaattaattaatttatttattttgaaatggagtctcctctgtcacccaggctggagtgcagtggcacgatctcagctcactgcaacctccacctcctgggtttaagtgattctcctgcctcagcctcccaagtagctgggattacaggcacatgccaccacgccaggctaatttttgtatttttagtaaagacagggtttcaccatgttagccaggtctcagtctcctgacctcgtgatctgcctgcctcagcctcccaaagtggtgggattacaggcataagccactgtgcctggctatccccaacaattatctaacccttctggaccagatgtttaagttgaccgagaaagaccaatccaactcaactccaaactccctcaaattttgagtaaatctgaaacagttgaccatgtatgaaaatgtagggagttctgatagacatatagcttcttgtgaaggtgaaagtaataccaccaaaaaataaataaaacaacaagaaagaaagtgataccactactaacaaggggatttttattaagattaaatgagttaatttactagaacagaccctaaaacatgggaatggctatgtaggtgttggccatattattatttttactgttgttaatgaggctatcaatattttagttgccagatagcagaaactgtcaatagacagcttattccattggaatttttataaacagaagggaaattctggaattgtgcttagataaaagtacaacagctatgaactgggtttgaaaagatggaaccaatttcctttttttttcctagccacatctcttaaaatttgtgttttatgacaaaagagattgtcctcactcaaaattaggctcaatgaccacaccacacttttttttttttttttgagacagagtcttactctgttgcctctgagcacagaggtatgatctcagctcactgcagtctctgcttcctgggttcaagcaattctcgtgcctcagcctcccaagtagctggtattaacaggtgtgcaccactacgcccagctaattgtatttttagtagagacaaggtttcaggatgttggccaggctggtctcgaactcctggactcaagtaatccacccacttcagcctcccaaagtgctggtattacaggggtgagccaccgcacctggcccacacaccattttttaatacagtatggtcaatcaactggaaaccacaaatctaaattatgcaaaggaaatatgtaaaaatatgaaagtcttctcagaaagagatattttttactgccactccacctatttttctctattttatgatgatttaaaagtaaaacaacattgcttttataatgaaaaaagcaacacattttcttttatttgtttttgagacagggtcttgttgttttgcccaggctggagtgcagtggcatgattatggcttacgatgtagcccaggctcaagcaatcctcatgcttcaacctcccagattttgggattacagcaatttccttccgaaaatctttttgtccttttctgacactgatttgaatggagcccaggtgggaagtgagcaaatacttttggcaccgaacaacatccaataactatgaaaggggttagacattctagtcttgtcactggtgtctcagtagccactgtgtcatagtttgtaaaagtattaatctatcaggtaggcttctgtttaaattatatacttattcatatggaaaattatccataggcagataaatggaataatttatatattttaaatccaaatttcatttaaaaataagcaatctatgtgcacagttaaaatttttaaaaagtgggggtggagccaagatggctgaataggaacagctccagtctacagcttccagcatgagtgacgcagaagacgggtgatttctgcatttccaactgaggtacggggttcatctcactggggattgttggacagtgggtgcagcgcaccaagcgtgagccgaagcagggcgaggcatcgcctcacccaggaagcgcaatgggtcagggaattccctttcctagtcaaagaaaggggtgacagatgacacctggaaaattgggtgactcccaccctaatactgcacttttccaatggtcttagcaaacggcacaccaggagattatatcccgcgcgtggcttggagggtcctacgcccatggagcctcgctcattgctagcacagcagtctgagatcaaactgcaaggtggcagcgaggctgggggaggggcgtctgccattgctgaggcttgagtaggtaaacaaagcagtcaggaagctccaactgggtggagcccactgcagctcaaggaggcctgcctgcctctgtagactccacctctgggggcagggcatagccaaacaaaaggcagcagaatcctctgcagacttaaatgtccctttctgacagctttgaagagagtagcggttctccaagcacacagctggagatctgagaacagacagactgcctcctcaagtgggtccctgcccccgagtaacctaactgggaggcaccccccagtaggggcagactgacacctcacatggccgggtactcctctgagacaaaactttcagaggaacgatcaggcagcaacatttgctgttcaccaatatccgctgttctgtagcttccgctgctgatacccaggcaaacatggtctggagtggacctccagtaaactccaacagacctgcagcagctgagggtcctgactgttagaaggaaaacgaacaaacagaaaggacatccacaccaaaccccatctgtacgtcaccatcatcaaagaccaaaggtagataaaaccacaaagatggggaaaaaacagaacagaaacactggaaactctaaaaatcagagtgcctctcctcctccagaggaatgcagctcctcactagcaatggaacaaagctggacggagaatgactttgacgagttgagagaagaaggcttcaggtgatcaaactactccgagctaaaggaggaagttcgaacacatggcaaagaagttaaaaaccttgaaaaaaaattagatgaatggctaactagaataaccaatgcagagaagtccttaaaagacctgatggagctgaaaaccaaggcacgagaactacgtgacaaatgcacaagcctcagtagccgatttgatcaactggaagaaagggtatcagtgatggaagctcaaatgaatgaaatgaagcgagaagagaagtttagagaaaaaagaataaaaagaaatgaacaaagcctccaagaaatatgggactatgtgaaaagaccaaatctacgtctgattggtgtacctgaaagtgacagggagaatggaaccaagttggaaaacactctgcagggtattatccaggagaacttccccaatctagcaaggcaggccaacattcaaattcaggaaatacagagaacaccacaaagatactcctcaagaagagcaactccaagacacataattgtcagattcaccaaagttgaaatgaaggaaaaatgttaagggcaggcagagagaaaggtcgggttactcacaaagggaagcccatcagactaacagctgatctcttggcagaaactctacaagccagaagagagtgggggccaatattcaacattcttaaagaaaagaattttcaacacagaattacatatccagccaaactaagcttcataattgaaggagaaataaaatcctttacagacaagcagatactgagagattttgtcaccaccaggcctgccctaaaagagctcctgaaggaagcactaaacatggaaaggaataaccagtaccagccactgcaaaaacatgccaaattgtaaagaccattgaggctaggaagaaactgcatcaaataacgagcaaaataaccagctaacatcataatgacaggatcaaattcatgcataacaatattaaccttaaatgtaaatgggctaaatgctccaattaaaagacacagactggcaaattggataaagagtcaagacccatcagtgtgctatattcaggaaacccatctcaggtgcagagacacacataggctcaaaataaagggatggaggaagatctaccaagcaaatggaaaacaaaaaaaggcaggggttgcaatcctagtctctgataaagcagactttaaaccaacagagatcaaaagagacaaagaaggccattacataatggtaaagggatcaattcaacaagaagaactaactatcctaaatatatatgcacccaatacaggagcacccagattcataaagcacatccttagtgacctacaaagagacttagactcccacacaataataatgtgagactttaacaccccactgtcaacattagacagatgaatgggacagaaagttaacaaggatatccaggaattgaactcagctctgcaccaagcggacctaatagatatctacggaactctccaccccaaatcaacagaatatacattcttctcagcaccacaccacacttatttcaaaactgaccacatagttggaagtaaagcactcctcagcaaatgtaaaagaacagaaattataacaaactgtctcttagaccacagtgcaatcaaactggaactcaggattaagaaactcactcaaaaccgctcaactacatggaaactgaacaacctgctcctgaatgactactgggtacataacgaaatgaaggcagaaataaagatgttctttgaaaccaacgagaaaaaagacacaacataccagaatctctgggacacattcaaagcagtgtgtagagggaaatttatagcactaaatgcccactagagaaagcaggaaagatctaaaattgacaccctaatgtgcacatgtaccctaaaacttaaagtataaaaaaaaaagaactagagaagcaagagcaaacacattccaaagctagcaaaaggcaagaaataactaagatcagagcagaaatgaaggaaacagagacacaaaaatcccttcaaaaaatcaatgaatccaggagctggttttttgaaaagatcaacaaaattgatagaccgctagcaagactaataaagaagaaaagagagaagaatcaaatagatgcaataaaaaatgataaaggggatatcaccaccatcccacagaaatacaaactaccatcagagaatactataaacacctttacgcaaataaactagaaaatctagaagaaatggatacattcctcaacccatacaccctcccaagactaaaccaggaagaagttgaatctctgaatagaccaataacaggctctgaaattgaggcactaattaatagcttaccaaccaaaaaagtccaggaccagatggattcacagccaaattctaccagaggtacaaggaggagctggtaccattccttctgaaactattccaatcagtagaaaaagagggaatcctccctaactcattttatgaggccagcagcatcctgataccaaagcctggcagagacacaacaaaaaaagagaattttagaccaatatccctgatgaacatcgatgcaaaaatcctcaataaaatactggcaaaccgaatccagcagcacatcaaaaagcttgtccaccatgatcaagtgggcttcatccctgggatgcaaggctggttcaacatatgcaaatcaataaacataatccagcatataaacagaaccaatgacaaaaaccatatgattatctcaacagatgcagaaaaggcctttgacaaaattcaacaatgcttcatgctaaaaactctcaataaattaggtattgatgggatgtatctcaaaataataagagctatctatgacaaacccacagccaatatcatactgaatgggcaaaaactggaagcattccctttgaaaactggcacaagacacggatgccctctctcaccactcctattcaacatagtgttggaagttctggccagggcaatcaggcagaagaaggaaataaagggcattcaattaggaacagaggaagtcaaattgtccctgtttgcagatgacatgattgtatatctagaaaaccccatcgtctcagcccaaaatctccttaagccgataagcaacttcagcaaagtctcaggatacaaaatcaatgtgcaaaaatcacaagcattcttatataccaataacagacagagagccaaatcatgagtgaactcccattcacaattgcttcaaagagaataaaatacctaggactccaacttacaagggatgtgaaggaccccttcaaggagaactacaaaccgctgctcaatgaaataaaagaggatacaaacaaatggaagaacattccatgctcgtgggtaggaagaatcaataccatgaaaatggccatgctgcccaaggtaatttatagattcaatgccatccccatcaagctaccaatgactttcttcacagaattggaaaaactactttaaagttcatatggaaccaaaaaaagagcccacattgccaagtcaatccgaagccaaaagaaccaagctggaggcatcacactacctgacttcaaactatactacaaggctacagtaaccaaaacaaaatggtactggtaccaaaacagagatatagatcaatggaacagaacagagccctcagaaataatgctgcatatctaccatcatctgatctttgacaaacctgacaaaaacaagaatggggaaaggattccctatttaataaatggtgctgggaaaactggctagccatatgtagaaagctgaaacaggatcccttccttacaccttatacaaaaattaattcaagatggattaaggacttacaggttagacctaaaaccataaaaaccctggaagaaaacctaggcaataccattcaggacataggcatgggtaaggacttcatgtctaaaacaccaaaagcaatggcaacaaaagccaaaattgacaaatgggatctaattaaactaaagagcttccacacagcaaaagaaactaccatcagagtgaacaagcaacctacagaatgggagaaaatttttgcaacccactcatctgacaaagggctaatatccagaatctacattgaactccaacaaatttacaagaaaaaaacaaacaaccccatcaaaaagtgggcaaaggatatgaacagacatttctcaaaagaagacatttatgcagccaacacacatgaaaaaatgctcatcatcactggccatcagagaaatgcaaatcaaaaccacaatgagataccatctcacacctgttagaatggcaatcattaaaaagtcaggaaacaacaggtgctggagaggatgtggagaaatgggaacacttttacactgttggtgggactaaactaattcaaccattgtggaagtcagtgtggcgattcctcagggatctagaactagcaataccatttgacccagcaataccatttgacccagcaatcccattactggctatatacccaaggattataaatcatgctactagaaagacacatgcacacgtatgtttactgcggcactattcacaatagcaaagacttggaaccaactcaaatgtccaacaatgatagactggattaagaaaatgtggcatatatataccatggaatactatgcagccataaaaaatgatgagttcatgtcctttgtagggacatggatgaagccggaaaccatcactctcagcaaactatcacaaggacaaaaaaccaaacaccgcatgttctcactcataggtgggaattgaacaatgagaacacatggacacaggaaggggaacatcacacaccagggcctgttgtggggtggggggaggggggagggatagcattaggagatatatctaatgttaaatgatgagttaccgagtgcagcacaccaacatggcacatgtatacagatgtaactaacctgcacattgtgcacatgtaccctaaaacttaaagtataataaaaaataatttgtaaagtatgaatgattcagtgataagtcttcctccctatgcctgctctagttccccttcctggaagcaaatagtgcttttaattgctcatgtatccttcacgagatgctttatgcacatgcaaataaatacacagatagagtcccaatgttattgtgtaagaagaatgatgtcataaggaatttgtgaagcctgaaatctgtcttaatagaaatatatcctgggtaagtaagcttctctatttttaatgttccaaaaaagaaggaatgccatcaatcattctataattactgagttcctactgtgtgtaaggcaccatgccagatgctatttgtactgtcaagttgcctttacaatttttcatatttatgtcttgttgattcagatttgtcctcgaacattcctatctcagaaagaccttccttgacccccccacttgaaagcagctgtcccttgccctgtcaactctatcacatctctgtgctttatttcttctagggctaaggggattctacaatttctcactatgtcttccttttgaggtgaaagggagtgctgttatcattacagaaggataacaggtgtaaattggcaatgtgacctgggatagttggacaccctcttcatagcatttatcacttcattgcatttagcattccaagataatggacattattttgtccacttatttgtttacttgtaagttccatgaagcaggaacttttcttgttctaggaatccatcacccagaagagttcttgacacaaaataagtaggttcttaataaatattggttgactgaatggatgacccaaccatgccccatattctgtggtagaactgagcatcctttggttggcactggtaaattgaaatgccatgaaggcacatttgctcagagtgctctttccctaagcagaggggaaaaaggagccaacgtttaatattcagattttgatttgcagtgttttccgtgaagacatgagtctggtagatgggtactagcaacatcaactgttttgttacttgcaaggagactgaggtgctgtggtctccaagataggcctggtctaaagagcagaccagtgggatgtgaacggtaataggccagttggatctggtggtcggttagtccatagggaaacctgtctccaagcaatggaacagctgaatccgcatgacttggtccataggccaaaaaggaggaacagcttttaagtggcctgctatgtaggcccattcaattcccaaggaggcaggaagccagtgggatacaaaggaaaaaacacctttctgtgtctgggaagttgctagtctgatcacgtgtatgtacatttcacacacacacacacacacacacacacactctctctcacattatgagagtccaagggccccaagagtctgttctgatagagaagtctaacataattctctaccaccgtacctaaaaccagaccaatcttttaaatcaggggcctgggttttagtggcttagtagctcattttaagttttccttctccttccaaacagagaggtctgtgtcctgtgttatgctgatctatgggagaattcctgcaggaggaaggggctgaaacattggcctaaggttattaaacagagctttcgtaataaatatgttgataccatttctgaaagatttgcatatttctctatcacatattgttcaattttattagaggaaatcattctggtatcctgttggaattgctgaattttggggtattatcttaagctccttgattttaatgctgtgggaactgagactcagattgaataacctgccttccttgacattaactgagataagctcctgttttcagaagttagaaccctctactgatagttgactttaggcatgtgttttaaaaacgacagttggatatggttgagagctcagttgctaaagctgtgaagcaacttgggacacacgtttaaccaaataaaattattttccccagctcatgctgtgctgacagcttccaaaaactgtgttcaccttcattctctcctcataaaaaggggctacaggtatttttaaacctggggtttgaggaagagaatgttaattataaatctagattagttgaatgtattcaagaatttgccagactgaatatgaatactcttggagtgtaagtgaaacaaaaatgaggcctttggtgacctattatctatcgatctatatctatctatctttcatcccagattggttttagaatgagaagaacaaaagttgctttttctcatttcttactcttacacaatgaagtggttaacaaaattgatacagagtgacaactttaatgatcattctgttgcaaacaactacaagtccaaacaaatatcagcacaaagaaaatctctattctgtgtagcaacatgttggtcagactttcgccaatgaaccacctatttaaaaaggacttgatattgacaaacatctctgatcagtctttgacgtttatagtaacaagctataatgttatctcctaccacctttctgtttaggccccaatatgaaatgcctatgaatgttataattttgtataactccaggagaaacatccaacaatatttttcaccttttttcccaatagtgaaaaaatccaaatataatagttatatttatggattctgctctttgttgaacacagtgctttacagacaacatatggtgacaagccatcactcttcctattttatgtaatgaggaaacttaaatacagagtctttaaggacctagtcagtcacacaaatactgagaaaattctatgctaataatcctatctgcaggtcacatcggcaccttactttcaataatcaacgcagggccgatcaattgcattattctactacatacaacttcttgttttagaatcaaagaatgtcatgcctataagcgaccagaaatgcctggactacctattcgaaaactttcatcttcattcttcttagagacattatgtcgtcatcacctgctgccactagatggtgcttgtcatcgaaacaaaggtccttcctcctttctgttttctttagatgcctattaggaccttggatgatacgaaagaaatttgattaataagctaagtactgggctggtattctaagaagtcctttagtacagagagttgttgattaaaaagtaaacaaatcattatcagtaaagcttacttacaccatttttctaattccatcagtttttctgctcattcttcttgtcaccaagctgtgtgaaccccaagacaaaaagaactaataaatctttctttgtgcttatgagaatcaagagacatggcacaagttttaggagaggtgaacaaaaatctcaggattcattgttatcacccggaaaagcaatcgaaagtgatcacatgcagagtttataagaaaaattaatcaatgacctttcaaaggaaaacacgtatatctcaactactggacactaatcaataggaaaggaaatagaacactcttttaattgtgggatagcaaacatcaagtaatgaaaatgataacagaggttgtcaacgctttgccaaagactctttttctcattaatttaagacacataccaaatctcacctctatagtactctcattgtctccctgcctcccaccccacaaaccaactttatgctccttttagggtaaattcttgccaatctttgtactgaaatgccttcaggagttacctatttaacttacgtgaaggaaagtttgatatattttgcagcagaatgcttgaaaaatgtgtttcttggactttttctttcttattcaccagcactgagtgttcatggctgcttcacgattataatgagaaattgccagctatgttgaaatacataatccacagtgtgaaaaactgctgaacagcaatggcaaatttttaatacaaaagtgacttccctttgcctgttagcttactttgcggttgctgattcttgctaactgcctgctcagggagtgaaagttaattttaacattagcctagaaacagaacataatcatttaggtgaaaactttaaagctaaatttttgttttatctttggttttgagtttcccatgaaaaattcccagtgatatatcactgcactgggttatgtagaatgtgtgaacatatatgtgagccagatgtgacaacagacacatgacagtacattttaatttcagacatcagattggcgtgtttccttgtgccttctgagcattaactaaggattttaaagatagaaactttttaaaagacacaggctccatacctgctttccaagcactggtgaggcaccatggatctctggatctcttccagttttgaatactagaaagaaaagcctctgtcctcaaattatttcctccctaccctcattttttttttctcttggaggtcctataagctatagctttgtattgaagaaatactggggaccaggagcagttggtatgttaaattatttctcttgagctttatgcattttggtggctactgttgaaaacacagtttggtcagtgatgtccacatacacattacatataatatgtattactagaaaatgatatacacttgcatgatataccatgtggttgcaatccattaagtgactactctctagcagtacccagaacaatagatggtgtgtctgtgctgacagtctgttcatatcttaatggtttacttatgattcaatagtttaccaatggcaatggtgctggatcactgatatattatttgcttggcaaagagtacttgaacctcattattagacttaggaacagaataaatacaaataatcactttgctaaggctgttttcctaactcccaaggaagacagaaaggcatcagtgacataagtgaaggacacagttgacaaccacgttatcttcagacatcttttgttaaaggtgaacaattacttaatactgtgttatggcagcactctatacgccccaagttttataaagtagagtcaagagtgatctgagctgggaaactcacgcaattttagttctgcatgaaagcacaggctctccccactggggaactcttttgagtaggacaaaaagctggacctaggacccagcccagggcgtgagagaaaaggaacctgggaggcaagagcggccggtccggagccgggtcctccgccagctccgggcgggcgctgcgcacagagcccaagcccccggcggaggcggcgcggctcgaggcccctccccgccgccgatgcccgggcggctgacgccgagcagcggcccggagcggtgggggccgggctggcgggcacgagcgagggcagggcagggggccggccgaggccacttacggctttaaatatggatcgcaggctcgcgctcgcggcacagcctccgccgcggccgccttccgtgagcccccgcaccccggcttgctcccgaggggcgcctgggctgggctccactgctgcagtgttagttactagcaggaacatcagagatccccataaatatgcaggagctgcaggaggcaaagtagagtagacgcccgcgctcttacacactcgctcgccgcgcaccacacaggctgtgtagacatccccccgcgccacctttcccctttcctcgcgggccgttcaggttgcagtcctgcctgctccgaagaccctcccgccccagcgcctttgccccgctctcccgcgctcgcctctctccggagcgcgcacccacccaggcggcaaagttgtgactacttgggcgcgggtgactggcgccccgctcgctccgcgcccggcgcagacaacttcccgcggctcggccccgccgcgtcccgggctcgcgcctccagggattccgcggccccccagcctccaaccccggcggcgcgccgggcagcgcttcggtggcggcggcggccgcggtggcagcgaaggcggcggcggcggcggcagtggcagtggccgctgcagccccacactccgccgccaaactggaggagcgacggaagccagaccccaggaggtgagcgcccggccccggcagctgccgggagggtcgatggggtccctcgctccaaggcggaggcgggcgcgggcccgggggccgattccgtagggcgcgcaggcggcctcagcgcgctcctgggagggagagagaggtcaattgcgggccgggcatcccctgagctgggcgcgggcggtgtgtggaggctgcttccgcggaaaagtattttttttccttcttagggtttagaggaagagtttgggtggtctgcttctccctcactgctaagtcccctgcgcgcaactgggcgtctttacgaggactgcggggccagttctgcggcgggctgggctcgggctcagtgacacgtgtgttgctgtgagcctgggtggtcgccctgtgaccaggcacctgcttgagaggaacacatccctaaacccatcacagggggagatttggggactcttggtgctaccgaggccgcggcccccacttcactgccagctccaggacggagcatttacatctctccctggcacgccaaaggcggggggtgagtcaggcagattctctgcaagtggcacacacacatttatttgcaatggatttggctaggggaggcataggttaaactggaatttctcttggccagcgacaacggagctctccctcaggtactgggcagcatgtgagtcttggcaaagagaggtgatttcttttttcttaagtgcattttactcagccgttgccagtccgttaataagtcaccagaggaaggcaggacctgggaactacatcagcaaaccgcagcaagcaccataaagacaaaagttcttatagaacaaaaagaaaaacttgaacttgacgtgaaagatggaggaagcagttctacctctcttctatcacttttttcagcgccctgtaaaactgtttttttctatccttccttccctctcaaggccctaccttctcagcataattgatcgcagcaagctctttccaacttgacactgaagagcagcgacccctttggcttaccctccccatttcttttcctggttcgcttcagtgccctggaaagttgctcctaatgagaaatcaagaacactgggctgtactaaacgctcattgtctcaaatcctgcagcagttcctttcctaagagacactgtgttgtactgtatttctcttttttcttgtatcttgggacttggagttgtaatactacctgaattaaattaattaaagtgtacattgctcatttgggcttttttttttcattgtgatttcagtagattcgtcaatgccattagaacaatattcagtagctttttatagccaatgtgatgtcttttgaaaacgtttctgactacagctctctttcttgtgtctttcatattagcatgtaaataatttacatggtcattttagtacttagactgaagatattagtataacttcattcaaaggaagtgtgcctgtttatttttctataacttttatagctgagaaaaaacttttactttcattttaaagttaaaagtactgataggattctggtctttgtggtagatcttgaaattgaatgatttgttttaactgtatcccacactgtcaagtaagatgacagagaaactctcatatatgtagatggagacaggaaagcagtaccactacattatgagctgttgaggcagagaacatttgtaggagtgggggtgacaaggacaagatgggatattttgatagtcccagccatgttaaaaaaactgaaaactaagaaacccccaacattttggatttaagtgtacttcagaatgagggttttggtgccatttgctcttttggggtcatttctggagacttaaaaacatacattagacaccttacccaatgagattgacagaatgtactctcagtttagattaatgtatttcttttagttcacgtagtcaatattaaataattttagatgtttgaatgttagtactatgatttcagtcttctaaatgattaagagacattttggatttacaaaaatgttgtgtgaaagaaataaaggcaatcagatttagaggaataatgcgatagaaatcgggtaacctttgggacaacttccagtaggccctgatggtaatctcatttttcgctgagtgctggcaggtacagttttgaggttctgatcccttgttccgataacaagagtgatatctggccatagcttacatcttaaaggaaaagacaacacttaaagaaatgcacactagctggtgaatcatgtaaataaacaggattccttgcctgcctctgtgagcgctgtagacctcatatgaggactgctattgttagaggagaagcgtcctgagagactctgctggacttaagtgtggcgagatacatatctgtttcttggagtttctttgtgtttatttaaaataatatgaatgaaatctaagaccagagttgatagataagattgggagtggaaagaacaaactgagaagaggaaaatctaatgatgattaacatttctaagtgtttttttcttgattgctaaatgaaggaatcagaatgcatgatttgatgggacaaaggaagctataagcagaacatggatctcagttgatgctgtttccaaggacaacctgtgacttatgaaatttatgtatttttagggagtcatttagcaaaatggataaagaacatccaggaagctagtaagactttacaaaactggatcttactacttttacataatgtaggaatcttagaggaaaggaggaataaagttttatttgaggtcagctaagttgtattccaaatacattttgcctttctcccaatatataaactcttgatacgtttgggtcacaaaaatggaaaatatgctgctgttcttctgacatgaagatgatctttttatcctcagtagtgcacagctttggttatttttccagcaatagggatggagtctcctttactcagttctgtctatgtatgtttacacacacacacacacacacacacacacacacacacacacacacagacacaactcatttgtagaggtggctgatttaattttgtcggaagccatattaactactttcgtaatacttctgtggcaatggcttttattgcatttggtagtctcagcagtgcaatgacatttctaacaagacattgaaaatacaatgagagccaggtgcagtggtcccagatactctggaggctgagttgggaggatcacttaagcataggagttcgaggctgtcatgtgctctaaaattgtgcccataaaattgctattaaattgtgcctgtgaatagctactgcacctcagcctgggcaacatagggagatcctgtctgtaaaaaatgaacaagtgtataaatgctaatggctttacttgctgtggcaaaggagagataaaactttttcttccaatcttcctaatgatgccaataattttattccttaatgataatgtcttacttgatgctgaatatagacggttccagacttatgatgttccagttaaaatttttcagaattacaatggtgtgaaagcattcacattcagtaggatctatacttcgagtactggtaacaacattctgtttttcactttcagtacagtattcaattaattacatgagctatccaatagtttatttgtaaaataggttaggctttgtgttagatgattttgcctagtaggcgaatgtaaatattctgaacacatttaaggtaggttaggctaagctatgatgtttggtaggttaggtgtattagacacatttttgacttgcaatattttcaatttatgatgggcttatcaggacataacccaccgtacatttaggagcctctgtactggaaaaagatagtggtagaaacagtaatgttgaaactatgtgcctctgtagttgtttgtgtaaaccaaaacatcatcttgttcttctttcctgaaaactaagtaaatataagggattgttatgcttattgagatgaagaggaaactatgacagagaactctgtatgcttttcttaaacttaactacaaattattggtggaggtaggaataagtattttaatcttttgactggtgatacatgtttgtcgaatgactgtcaatgaatgggtgaatgtccttttagtcacagcagaagatactaaagcagataaaagtttatcctgttttaaagtgatggtttccattttctgttggtaattctgctcagtagcagtgcccacttgccgcaactttatttcagtttctgcaatccagggagtatttcatgagagaagaattttcagtttgggtgtaccagttttagctaccatcttgagagctaacttttgtttttcatgtagaatgaacatagaaagaaattaagtgaaattaggatgttaaaggaaataaataaccaccaactgatattttggagttttgtatttttactttgtggatagttgtgtggaaaaggtatactccttgacttgaatttaactcgaatttctgtattagaaaccttaagaaagttgtaaataaaactcctagtatgcttttttggggattaaaaaaatcaatatgaataaaaatacaaaatgagaaaggagtatgttatgtttaacaccgctgtaatattctatgggtgacacaactagaaaaatctcttaatatattgaagacgtcttcttatttaagaggaaattggtgatttctttttttaaagtatattcactgattaatattcttcttaatactatttgcaagtaagtaaacttgtgggatatggacttctatgttagttaattctagctttggcctggagatctgatattcactgataagatctagtaacaacttcatctatttggaactcctacatttgtcatgttccccagcaaaaaagtctctgagcaggcaaaatagagggtaaaaaagtaaatacattaaaaagaattcactttactcctaggacatccctcagagtcagtttacttttaatacccatactgttctatgattgattataaagtttttaatcccatagcaaacagtaaactacaaagtagaagacgaaaatgggctttattggcaaatacatagaaaacattgaaaagtgcctgaaaacagcgtggtagtaaaggaagaggtagacagaagtaagaactaaagcaaacacagtggttgaggactatttagatttggactcttatagcatcacttcattacacccccttctccctcccccactttctcagctcttccttattttcccctcccctcttccttctgttaagtttttattgaaatacatatggtcagaaaattgtatgtcatcataccatcagtggacatctcagcgatttacctaagtgaacatgtccatataaccagtgccaagaccaaaatatagaccattgctggcatccggaagtctcctctaactccctcttcaagtcattacttcccaccaaggtaaccactctcctaatttctgagataatggttactttcacctctcattgaactttctgtcagttaattacacggtgtgtattcttgtgtgtgacttcttttgctcaacattatgttgtgagattctttcttgttttgtgtgaagcatcagtttattctcattgctacatagtgttccactttagaagaacgccacagtacatttatccattttgttcttgatttactaattttgtttgggttgtttccagtttttggccattatgaatagtgatgctatgagcattcttacgtatgtcttttggtgaacatgtcgccctgtctgtcgcccaggctggagtgcggtggccggatctcggctcactgcaagctccgcctcccaggttcacgccattctcctgcctcagcctcccgagtagctgggactacaggtgcccgccaccacgtccggctaattttttgtatttttagtagagacagggtttcaccgtgttagccaggatggtctcgatctcctgacctcgtgatccgcccgccttggcctcccaaagtgctgagattacaggcgtgagccaccgcgcccggcccatgtgggaatttcagttgtgtgttttcccagtttaattgatgggacggttttagtagatagtgccttccttcagaattggtgctaattcacattcctaccagcattgtgtgagagtatcatctaccccacatccttacaaaaggggttttgtatgtcttttttttaaaaccattctatcggatgtatagttgtatcacagtgtagttttaatttgcatttctcagagtaccttgtctatcttttcatatgattattgtctacactttttcgtaaagtacttgttcatgttttttgctcctgaagtttttatccagtatcttttcccaagtaacgaagattttaatacttggggagttcagttcttttatttgtttagaagactcagctaaccaggcaaactcattcaccaatgcttccacctgataagtaaactcatgggataaagagattacaaacattttgaacttgtaaagatgatagtctggatcttcgaaactttatccctaaaaaataaaaaacccaaaccaaaacaatattaaataactttaatacagtactcagaaacatgcagaacttgtcctcaatgctttacataaaagtagagcatcttgtaatgttgtattgcccaatgaccaatggagatttgtatttggaaggtatgaattgaacatctagctctcttacttattagttgttttgagaatttaaaaaacatccgtgtcttttttcattattaaaataattataaaacctcattcacagaggagttatgaggaacagataaagtgatctttatgaaatcttgttcagcactgtaaatggccatacatgttagttattattattgttattgtattcttcaacattccttattcttgagttgaattatgccagcactgagaacagttcctggcatattaataaatgtttgttggctgaatgaatgaacacatttaagtatctttcttaaaccgttactctgagtgactcaagctgtgctttatatattttttttctctaggacttttactttttattgctgaagctgagttggaaccaaggttcatcaagcatcatattgaaaaattgagtctaagagccagcagtttgagatcacccatttctatatagttcatattgaatttatgcctccaagtaacacacacgacttggagaacccttgaaaatgattacactgctcttcactccatgagtgatccccaaagcttacacattgaatatttttagcttctataattagaatggccacaaatttccagatttaaaatattacagtgggttctccagtgctaatactttggaaaccatgttttgtgtaaaattgaacattcaaggatgaagaatagctgaaaactggagcttttatagtaccttttcagcttaatataaataaggtgtttcacagatatgttgattataatatgaaagcaaacaacatacaccttatatacatttgtgtaaagcaacaattcttaaccctttgataggtctgattttcagctttggcttgatgttgtgactattcaaaaagtggtttggaggcatatcatttttatttttaaattaaatagaattaaaatgtgtatgatttttgttttggggaattacatgatcttcctttaaataacagtaggtatccctttgaaaaatcaggcttgcagcagaagaaacttggatttctatatagaaatctagttagattttcttacccaaagactgatgttcttttccttttttcctgtatttgagtttttttttttttttttttttttttaaagagcttatgggggtcttgggtgtttgctgccatcatttaagtatagctgttctgtggtactcagaatactgagcatgtaacattttacttcagaataacataagtcagtctacattttataaggacgtttacatattaggtagtataccttgtgtgcttgacgcaaatgtggccaatttagggtgatttagtggaaaatggaatcatctggtatagtaaacagcttttgttttctgttacagacataatgttaggaaaattgaaataaatacaaggggtagttatggtgaaccctgttaaactactgttttaaaaacagtgaatttcagaaaaatctcatctgttctgagtgatttcattcctttgagaagttaaactggctctttttaaaacaaatgcatccaggcgtgcctggttattgctttatttaaagctggaagcaaggctcctttcggttcttacttgacacatgggatttaaaaaacaagggtatactatggatttagggaaggatacctgtttaacaaataggattatgacaattaaactatctaaactgaactccaaagggaatgggattagctcttccatttcttgtgcccttcagcatggaaatctgttggccttattgaaatattcctaatgtctctaatacaaaccaggtttttgcaccttctaccccagaaggatcaggaatgaagtcctgaaagtgatatttggtgaaatatgttttgttctgagtgagtaatcagtgggaccatcagttaggctgaaagtttcatggaatcttgagtgttgatggctgcactcctgaaactctctccttgagtactgtgtgaccacagctgcagtgagacatcacagttgaactgcttcacaaattccttcaattcctttgacctctggagactctgtccttaggaatgtgagatgagcactcacgatgttagcagcgagtagggcctcatggtagggactttgctaaagtactaattacagttgctttggaaaatggcagagcattaacgattaagcagagacacgcagctcacacatttgcactttcacaggttgagctcctttgccagggaaaagggagaaggcggataggaaatgtctcaaaagatttagataaactagattagataatttctcttgaaaaatatattaagaaatgaaataaaaacaccactccaaaagcatcaaaagaaaatatagttcaaacacttacctatttttattgccaaaaccttaggcagtgaattctgcagttgaattgatcactttattgttttctgctttgcactgccctttaattgtttcatatgtgttcatgttgtctacacagtatactttcccatggtcctcacggtggccagaaaatgcttatttaatggagggatacttagtatttttaaaatgtgtactggctgggtgcggtggctaactcctatagtcccagctacttgggaggctgaggcaggagaatcgctggaacctgggaggcagaggctgcagtgagccgagattgcaccactctactccagcctgggtgacagagcaagactctgtctccaaaaaaaaaaaaaaaaaaaaaaaaaaaaaaaaaaaaaaaatgcagacagaccagagatgccaaattatcttatccaactttatttaaactgtatttctggctgggcacggtggctcacgcatataatcccagcactttgggaggccgaggtgggcggattgtttgaggtcaggagttcaagaccaatctgaacaacatggcgaaaccccatctctactaaaaatacaaaaattacccaggcatggtggtgggcacctgtaatcccagctacttgggaggctaagacaggagaattgcttgaacctggtaggtgggggttgcagtgaggtgaggtcgcaccactgcactccagcctgggcgacagagcgagattccgtctcaaaaaaacaaaaacaaaactgtatttcttctggagatattcctccaatgcagtagctgtgatcattgctattaggctttttacatactttttgtgaaattcattgtaatgaagtttggaacccatatctttggggatgagtctttgttattatggtttgtgatatgttatagtttcttggaaaaattaattaacttattttgatatgactgtatttgatctgttctttgagttggataaattttacttattgattatttgagattaaaaatgaattgttagcagttttataaataactttttgtttttaaacacaggctcactagaagttgcaaaaatacagtgcagagagtttttctgtatgctttacttagcttcccccaatgaacaccactttaaagatgcctaaaaaggcctttacctaatgggtgcagcacaccaacatggcacatgtatacatatgtaacaaacctgcatgttgtgcacatgtaccctagaacttaaagtataataataaaaaaaagatttataaggaatagcaatttttatacttgctctgaagaaatatgtatttattaatcactgattatatgtataaccacagattataaaaaatagaattagagacacctactaactctctattttggggggttgtgggtttccgttggaaaaggtgctcatgtggcaggcaagaaggaagagtcattcattcacttatttattcatatctctgtgaatttggtgtttgcctcattcaaatcatttaaaaaatatttatcatattgattacattgaactaagagtttgaagtccaaatgttgttcctataaaatctttggaaaatagaatgcaaataaaagtgaatgagagtagaacttctttatggtacaggtattagggcagcatgataacactggattttatgtaaaggtgagagaatatcattgttctatacatctctgttaggtgcatgtcattaccttacaatatatgtgaaagcacaatatattgagacgttttagaacagatgtttcatttattacatatgcataatatttccagtgaaatctcagtgtttcactactccttaatatattgataaatattacacttgaacatgcatttgagttcaattatctcttaataggaatatttaagtgctatatttctatgtttgtccatgtatctgaactttatgcagtcttgtctagaatattcctttgagggtttggtcttgcacctcagggcagatgtaactgggaagggtctagagaaacacgctgcatatcatgagaatggaggagtttctttaagagaacacacagaaagttatttgaatgcttagggtcttgaacaatgaagtgtaaagtctgaaaggagacctcaccaaagcctgtaatggtcatgaacacttaccccaaatccaagaatatcagaactaggagcaccacatataagagagaaataggctgggtgcctcatgcctgtaatccttgtgctttaggaggctgaggcaggaggattgcttgaggccaggagtttgagaccagcctgggcagcatagtgagaccctgtctctacaaaataaaaaataataaaaaaatacataactgagagaagtaggtttagcttaaatttttaaaaagtttaagtttatacagtgggtatttatgtgagcagatgtttttaccacaagaggagaaactggatactctaacaggagaaggtccagagcaaatcactgggtggattaagtatttatacaatttaaaagagaagatggacatttggtaaatagacctaatcttttgggtggttattctctctttactcaagactttacccaggattatcctcttttcacagaactttcttcaagtcacttatcattttgtagaataatttcctgttctttgatgtcgtcaggtgtcactgaaagttggtctagaggattgtgggtctgaccgcacatgacagttcctataaagtttactggcctcagcatgtcttatctcagctcttgaccttgactggaaggcactagtgtaaatgcattgttacatttgaggttataaaataagcacttagacttccttatacaatttctatgaaacaagtccacaccttgctactgataacatgaaattggatgttatttctgaattgaaaccaacatttttggtttggggtttatctggtataatctcactactctgaaaaagtttacttttccaaataaatgcaatatattttattttgggtgagtttaaaaatcatcatcttggatagcttttttaaatgtaatactgtgtatgcaaattaaagagcctggaaagtctggtgccatgtattcctgtttggcctacagcttttagcttgtgtgatagatggattctgccacatgggcttgaacaacacagtgtcctttttttatttttatttttattttttgagacggagtcttgctttgttgcccaggctggagtgcagtggcgcaatctcggctcactgcaacctccaacctcctaggttcaggtagttctcctgcttcagcctcctgagtagctgggactacaggagcgcaccaccatgcctggctatgttttgaatttttagtagagatggagtttcaccatgttggccaggctggtctcgaacccctgacctcaggtgatccacctgcctcagcttcccaaagtgctgggattacaggcgtgaaccactgtgtccagcccacgagtcttttatataaaaaccagaacagcaggaaaaagcaggttagagcatgtggcccaggctgctacttgagttgacagctgatggaataaattcttagttctgtagagaaagtgaggatttagtccttaggtgattgtctggggatgtgggatctgacagaacccctatggcttggggagcaggggtgggatgatgtgaaagccttagtaggtactatgcagggtctgtggaatcaaggaagaggaaatcatattttgaggaggctgattgtgagaaactgtgaacctgtctgcttaaattacaagagtggcctgtttatctgctgtcaatagagtatgaagtagtcattttaattgaattttctgataattgaagcttattaattgtctaaaattatcttaagatattttctgatgtacatcattttaaaatgagttgcacacatttctattctgtttcaacatattcaatataattttcgctcttgttcatctgttggtattcattatataattcagacgtggtctcaggtctggagacatgtgaagttattgctcctacactgagtgtttccatgtcattatgccttaatccttatttagacacagctatgacaccctctttacaacataaaggataagcaaaaggatgtataaatgtatcctgggctggaaagtggcattattgactggccattggccatcagcaaaggggcctgagtggaaggatatgaaaggatgggtgtaatgtagatgacgggttgatgggtgcagcaaaccaccatggcaggtgtatacctatctaacaaacctgcaggttctacacatgtgtcccagaacttaaagtatagttaaaaaaaaaaaaggatgagtggtgagcacagctgacacaccccacgaatatctggggggctttgagaaggttgctgagatccagtaatcatgtggcaagtttcagttatttttattgagacctcttggctcaataggctgttgaggtcgttggaaactcccatcaaagttgttttccaaatcctccatgactgtcagggtttccctgtgcgagttaagagcatgagctctggagccagagagcccaggcttgaatcctgtctctaccattgtcttaggctgagttccctgtgaaacagtttgtgagattgtgcaagaagtttactgggacttgtactgagggacactacctgttggggagttaaggaagttggactgggaagagggaggagctgaagagcaagacagtaacagaggcctcagctgaacccatcaggagctctggagctggggagagagatcctttagagttgcccccagataaggaagctaggcctctttatcccacaacaactggtcatgatatatgggctgcctctggagaggggtgtgaccttgggtcagacggctctctttggctaaggtaatttctagaacaaggttgagctgagcgtcatcaatgaacactccaccagctggggaagcacctctgttctgcaggggagatctgggctgcacagcacagcaccaaagacttcgtgccttatgacgggggactctgtgcttccaagttctttatcccaaccttctttaattcctagagtttaagtaagttaatgaatgtgaaatgcctagaaaaatgcatagcacatagtcagtatggtttaggtgttcgttattatgatcatacctgactttatcagccctacctctattatagtgtggttcttctaatatgctgtgagtctgaaagctgttaatactctccttatttttttaaattttctttgcaagaggaaaacatctgacaatattttagtaagaaatgatttaacatataatgtgtttttgtaccatttgtgtttttaatttttaccagaagaaagatgcaaaagaagtgattactgatgatgacatttgaaggatttggacatatggtggataaaagttttaggagtatgtgtgtattagttgttggcctccctcaaagtaacttagataagcaatctctgagttaacagagagttcactgctgttgagttggagactggtgtgataagagcagttcataaccaggggatagtgtccagctgagaagctcctcgaagtgttggtcttcaactatcccatcactgtaggcctagatataaacattagaacatataaccaatacatatagcattgacagttaaattgctttatttcttaaacatttcagaatcattcatttccgtatttaaattccataaatatagagcaaatcacctggaatgttttagaaatttggttttgattcaaagtaatgttctcatggagatgcagtctctgccaattcatttctcattcactttaggacatggctaattcccttggacagtttttatctccttcatattcaaatgggtggaaaacattttatctgaaatgactcacccttcccccacctcctcaaatatggcaactatgttgtattgtttatttttaagggactatctaattgcaccgttaacattaaagcagagagttaaaaatgtatgccacaaaacactcttttaaaatatcaagtgtgaacatgtcttctgtttgtaccagtaatccattatttgtataccctaataaagccagcggagtggaggaggaaataatacaacaccttctttgaaaattttttttaaaaaagagggcttccttgaatccattttcctccccagttttaatttaaattgctcgtacttattctccatttcttttaaagaaatgagattgttagaaatgaaccatggaaagtaatttatctacatatttattatatgatgatctgtagaaaatgaggattacatggaatacacagtaatcatcaagctgtcaacaagaaattttgttttagcttaactttcttagacattaaccttgtttctgagttgagcaatctgttgtgggttctatgcagaattccatggttacttttgttatgtgagccaagaacctaatggaaatcttctcacttcagcaaccagctaacgttttttttcctattgagactaagaatatataacacatttaagattttagttccacattttggcggagggtggtgtttgggaagagtgaatatggataaaagatttgaggtagactactagatgtgtaaaaatgtattaatgtttatatatgatgagtggtaacaatgtattgcataacaagtcctttctccttttagaaagatgacttttaaaactgtgtatttaggggattaaaatacataaaccctctttttagagaaacattgttgagcttgatttaatgggaaacaactctatatccaagaagataatgctagtgtagcttttaattctcaaaaacctgaaattatgacattggtatagatgatctttcactgcgtaagagatagtgaagtaaaaataatattttggacaaaattatgtattgtgtccaaaatgggtgtaggtgaaatttctactcttgtatatttaatccgaagccagccacagttactgtgtgatgactttgcagagggtcctgctcatgactcccaatttaaaaaccacttaatgccctcttttttgttagcatgcatgtaggtaggtttttatgtggattttagttataccttggcgaaaaacatgcatttctcaatcttgggccattgacctaagttttttaaatgaataaatgcaaaccagaacatattgtaagaaggaaaatctgttgatccaaaacacttgtttatttaaatagaatggcttattactttcatttagagtataaaggttaatcaagtcttgggattgttcatctaaatatgtaaatgtaatgcggtcagggacacctgaataaatgtttgcttaaatgataactagttagtagaagtatattaaactagattttaatcactcacaaagttttacatgtgacatgtttagtaaactcactgtttattatgtaatttaagtaaaaggcagaagaggaaagatacctaataagcgaaacactgtaaattccagaaaagccatgttattagaatttatattttctctgaaaaccaagtagtttttcacccacaggtcactcaaaggtttatcaaaaggagaggaagattccatgcggtgttggctatttgatctaatggtctaaatgaaatggaaaaagaaaacatgtccttatgctaatggttcagtttccaacaataaacctggtgggttcactttaagtgtggtttcctgaaaattgatgatgatttttagcacttagcttcttatcttcaaagcactttccaaatgttaaataattaattgccacaacccccatgtgggcgtagaatagcaagcatgtctttctgtttaccaggaagccattatgacagagtctggaaatgttgatttttatttttagaggtgtctttgctttccaaggtgaccagcattttaaatgatgtcctggtttccaatcacagggtcatgggaaaagttaccaaggatgttgagtacttgaaaactttttattcttcttgtttccatacaggtttcacttttcatcttacttttgcctgttcatcattttgcaatactattttttaaaatggaatattaaatattagcaagtttagtctttgctattagtatagtctctttgtaactagtaaatacagcatgcagaaaacctggtggaactaggagggataaagataactttaagtggaaaaaaaatcacatttcaaaaacaactttaatatattaaagaaatgaatcattttaaacaatagtttttctagtctaacttaaccttggagcctgaggaataatgaatatagaccatgtatatgtctaacagtgtatagttgcactgtatgacatatattgaggatgaacttatataaaacaactagagaacaagaaagacaatgagagaggctaatgtagacaaaataaatatggaataagatggctaacactggggttaacacgtacatcttaacactggatttaacgcatacatcctgaggagactgaggtcatgggtgatggtgtgacaggacctttaggaaggaggtgggttagaatttacaaggtaggtggtgactgtcctagcagacaatacctacattagccagactaattcccagcttgtttgtgttgccagcgtcagaatatctactgattagctctctggagagatgcaggatggagtcactgtggcagatgcagaaggctccccatccctcagcttctcaacctttgaaatagaaaagagccaggaccttactttgagagcagtcaatccctttatgctttgagaaacccaccagataacaaagagaatgctatggtgattatttctgatgaatgttgtttctttgcatacgattaacatctttaaaggcagagcagagttagatttcttccatgtcattttaaggaggtaaggcccccccatcccccaaatcagaagtgtcagctaaacacttgtctattgaatgcaggtatatcttcttcatcatgaagtttgagacccacagctgggcttcagagaaacccctcgatattgttgtatacagaatttgtatatatatttatttttttctggagaagtatgtccagcatatttatgacattactgaaactggggcatacacacaaatatttaatatttaatactgactaggttcccttatggaccacaaaacaaaaggtcagtttctagctattgactcctccaaaatttgaatgaaaataaaatgagagcctgtcagctgcaagacatcacctccaaaaaatctaatgtttttctcttatcagaaagatcagaaagtgcaatgatgcagtcaaaaccagtgaacatggctatttaactacagtacattaaatttggaaaggtaatgatcaagattattttatctaccatcagtcatgggactttcttactatcagatctagagagggtatgcccataaggataaggcaactttaattgtgcatttgtaatttagctcacattcaaacatgagtgctttgatagcctttttgtgggaaattgctcattgactatgtcgtagaacgcatttgggaagtaggataattctttgcctctctatagttctttccataagcaaagtagttattttcctgtaagtttgtatactaatttaatctttgttaataagaccacattttctgtgaaattttgcaaataagatcatgattataactcattaggggaaggctgatatttaaaggagtattggaatataagagaatcattaaatatggaaaacaagaccaaaagactagggtattttaattgaagttcattgttggtctttgaggtgtgagtgttcaataatctcatgaaactatagccacatttaaattatatattcatatatccattttatttttaggttacaattcacagttttcaacagatttccaaaaggctcatggccccccaaaatgttaagaattattggcttataatgtcagaattttataagtgcttatctaggaagaagccttccataattttgagaattttgctcaacttcagtaatttgaaaacaggtcattgataaagaataaaatagtacaatacagtggagttcaaaactgtttagttctgagtataatgctttatgaatatatattagacttgacaaatgtgtaagaagataagcaagaaagatcaaactgttaactccgaattataactgagggcctggggctgaatatatgggttgaaatctgtcaataatctgtgaatctcattaaaaccagtagttggaaccatttcactgatgaaattcacattcattttgattattattattattattattattattttagaaggagaggtttccgaccctagtgattggtttggggtttcatttcctctactataatcatctactgcaagcgaatcatgcagtggttaagtattcagcctctggaatcagcttggacgatcatattactttgctactatgactgtggtcttggggaattcacttgacatccatgtgctcctcttctgtaaaataagcataatggtactagtaatcttataaggttgtaatggaaaatcaaatactgtagtgtatattgagaacagtaccacctgtctcaactgaataattttaattttgtcatcatttctgaagtgatgcctgctcataagatagataagatactggcagctgaaaggacaataagaagaaatgaggtgttggctctattccaaacactatggtcccttgaataaatgagaattgacgatttgttttattgacactagtctgaagtctcctggaaatgtttcatctgctttagtatgtctagacagatggtcttcctgcatagaatatttctatgtttattaattcagaattagaacaatttaaaaatctgtaagcatgtgtgaggataaatttatagcatgtgcttccatatccttaaagcaaagtatatctataggtgcaaattactgttgatcttaacaactatgatttcccaacatttggtgggtatttaactttcacttgtttacaaaaaaactaaatgaagtcacttgactatgaaatacactttaaaatattgaaatcagatagccttagatgataatttttctgcagtggtaaaggaagtattggaagtgatgcaaaatttgctacttcacattctccatcaattacttcatggtttttcaagttaatttgtatttctaagaactgcatgaaggcttattttctttgtgtagaaaaatattaatgcttgaattctgttttttcctctttattttcatttgagtttaggaaatttttggaaggctttcctcctttttcttcggggagacaggggctcattccattgcccaggttggagtgcagtagtgcaatcatagctcactgcagtctgcacgtcttaggctcacgtgatcctcccacctcagcctcctgagtagctgggactataggcacgtgctaccttgcccagctaattttagtttttatagagacagggtcttgcttgttgcccaggctggtctcaaacttctgggctcaagccatccctctgccttggcctcccaaagtgctgggattacagatctgagccactgtgcctggctgctctcctcctttgacaaattataataatataacaatgttggctgggcgtggtggctcatgcctataatcccagcactttgggaggccgaggcaggcggatcacgaggtcaggagatggagaccatcctggctaacatggtgaaaccccatctctactaaaaatacaaaaaaatttgccgggtgtggtggcgggcacctgtagtcccagctactcaggaggctgaggcaggagaatggtgtgaacccgggaggcggagcttgcagtgagctgagatcgcaccactgcactccagcctgggcgacagggtgagactccgtctcaaaaaaaaaaaaaatatatatatatataataaaacaatgttactattacaggtatccagatatattattggctaatcattatctgtaaaatgaaaaaataattggaaataaaatgtggtattacacaatttatcacattatattaaaaggggcctacattagaatgtgtagaagcaagcctttttttttggtattaaaatctcataatctcatttaatgatttattaattatggttttctttcccattacggccttttcttttattgttgtcatctggactcttctattttaaatcacctttctttttatgattgtatgaaaaacaagttaacctagttaagttgggttctaagatgcctgaatcagtgtcccacaccatttataccatctcttgaggacattagatgatattcacgtgaccctcacttgagtgtaattcttgagccaggaccaaaggtttgacatgagatgaatatttctcagtttttttttccttgagtttccagacttgaaattggctagcaatcagctggaatatttggttatagagacaaatttggttacgctagaaacctgatctttagaatggctttatgctctttatgcaatgctgaaagtcttcagaaagtttgtgtcaaattttcttgcctttgtagtttattctgcatgatcagaataagtgtggcataagttactttatatgacaagggcacatattttttccccccatgctcaatataatatgcaaatcaaaaggaccctcatactatctgtgctattggctacagtgtattatgtctaacttttgaaatgaacagtggcatttttatttcatagtcatctattgagcactctgttaggatcttggaaaaaagaagcagcagggcacattcctccctaatgtgtaacagtctactgggggagacagggcagacacatttagaaacagaattctacaaggatgttgcaagaacagggtcaagtgaagggtgtctgaggttcacaggtgctgaggcttgaaacctttcttttcttcttcttttgaatacaacacttagatcacattgttgcagctaataaagatgtatcataaaatatgagtaccagtagctacctgtaatgcattttggagattttcattttattgtatctttcttcagaaaattatgagcatttcaatctgttagtactctgcagttgcatatcaattggactcaaattgctcaatctctgattttcagacctatttatttttttccttcctgattattgtgagaaatacttcctgagtattgtgagaaatacctttaaaacctaggttttaaaggtagctgactttgctattgtggtgagttatgcttaaaaattggaaaaataaattatgatgtatttttggattaactattatttacagttttcaggagattttagcactgtattttatttcatcattattatttttatttggttgtatgttatttggagggactgttccagtgctttttgtggtctaaccatgaaagtctctgagaattgaacatttatacacttttccggagaacgctgtgaccatgtttatctcttttttccttttgcttttcaccttagttgcctgtcttttgaagcctgccatgctggcaatgatatcacatatttctggtgctttttgtaactaccagtgtggacaccaatggggtgcccatctgagtagccctgggtgtcgccctgagctcacctgcatgttggcctgagcactgctggtattgtagggatagtcaatgattgcttcctttgggcaagcaggagctgcaaccccctgtgtaattttctaggcagtaagcaagggtgtgtttaccattatccttcttggctgtttaatagccattatctaatttaaggagaaatcacagcatctatgcaatctgtcaaaaaacatgatgacttaaacatacttaatgtatttctagaaccaaagtaacagttgccagaaatgttgaagaaagtaaatgtcttctctgagaaactttagtttgtgggcaatgcattgtatgtgttaaaatgcataatctttggtaatttttcaggaaacattttcttatcggttatttctcacaaaataacatgttatttgtgatttctctttctccatctgtccttccattccccacacttaccccaaggaaaatcttagggaaattaacacaactaaggagaaggctttcttcttgttactgggaacactgtgtaaacaaaatgatcagaagaatctcttttaaatcttgaaaaagtatatttgttggaggttgaagctatgttgttatgtttatatatttttctacctcagtagtctgtaatctcctgaatgaagtgtctgtatcttattcattttttatgtcatcagtctctagcatggactgatgcagagtaggtactcaataagaagttgtccaggagagctgaactggaggcatgcagctgcagttataaagatgaaaagtgatagagaaaaaatatttgctactcagaatttccaaagaattgtctgaaaaatgtgaaaagacttcgagccaaaatatgacaaagaaaactcgcattcagaatgtttttctttgtaatttgtcttggcaacatttattcctttgcacagatccatgtggttgttagattgctttcaaataatatcgttgtatgacagggtgactgcatatacttttaccacaaaataccttcacaaaacagtttatctttttataattaccttttgtcttttcctttacttactcctacagattttaggcttttggcagattcagaaaagatttatcttttatttgcttttaacaatataaagacatagtgattctcctatgattctgtattctgtaaatttaggtctgtcatcaccatactttatttaacatagagaattttttatatattacctgtgaaactccaaataatttgcaaaattaagatatcaaaatggtatatgatagctcacaccatgaggttgtttttaccaggaggtagaaggatactttgggtctgtaacacaaactactaacaataaatttctgtccatcctaattgcgaatataccagtttttaggagtgacctcaatgttgctgcactctgaagttttaaaaatgtgggtatgtttaacagctccccaatgaatctgagcaaaaacctgaagtgttggagctctgccctaatttggtggacagatttttcacaaatctttattgctaagaagatggaacatttgacaatttaaagtcatgtcccccataagttgagagtaaacacattagtaatagtgtcacttgaatttatctgttttttttttttttttttttgtgtgtgaacagcttataatgctttatggagcttatcaaagccacatggtgatgactgtcaggcctggagttgtgcaaaaatgaactttggctcttgcagcgaaggaaaattagacgctaaaaaccagggattttttttagaattacctaagacagggtttgtaagatttacaaccaaattcacggatgtgatgattgcagtgctccctcaccaaggaagccagccaactgtgaggatgtctcactggttgtgtgtgaagacaactaagatgccatctaagaaaatctaaccttccagccttggcttgtacaagtgtgtctgccctcaaagagtcattccagctttctgtcttctgtctgaaagaataatttaggtctaattttaaaattgtctaattttcccctaaaattttgagttctttatctctattgttactattctggggtttggaaccctctggctttttctctaatgggctgttcactgagcttaggtttctcacttggttagattcggggttagttttaatgtagtcaccatcctgtgttgaatcctcaggatcaggaatggatctaggcagaattatgtctgactgggagagtagccaggaagaggcccaggcctctggagctgggcagaaggtgggggttgcccttgctgggagcagagggtgaataccagtgctgacctgctgtcagaggggctcaccagaaatgagaaaaaccagatggtcactaagaccagagttggaatccacaggacagaggcacaatggggttggagaaccatgggatatgaaagtgtgaggggaaggttgagactagatgaatgagatgaggtgggccatattccacaatggcaatgacatttcctgtgtgcacgcgtttgtgtgtgtgcacgtgtgtgtgtgaatagggtagcaggtttagttttgggtaggccaggtcacattaaataaactggcatgggataggtactagggagctgagcagagtgattaccatgaggctaaagctcctctgttgctgggggaaagtgtccaaaggtgagagaagtaaatacagtcattccttgcataacgatgttttggtcaatgatgggccacatatatgacagcagtcccataaatttatattattgtatttttactgtacattttctatgtttagatacacaagtacttactattgtattataattgcctacagtattcagtacagtcatgtgctgtatgggtttgtagattaggagcaataggttataccacatagcctaggtgtgtaagaggctgtaccatctaggtttgtgtgagaacctctctgatgttcacacaatgacaaaattgacaaacgatgcatttcttggaatgtttcctgtcatttaccaatgcatgactgcataagacctgatgataactcagaattctgtattttcctgcatacagggtgttgctgatttgcatctgtttgtcccttcctttattgtcattactagaaataatgctggattttacctcataaagtattggctcatgagtgccactcttgacatgttacaaggagctggtaaagcagacatagagaagcctctgttcttatttttgagactaaaacacaagaaagctctgctttcaggctggtgggcttgaaagcaggggactcttttgtcaccacacaatttgatcttactggagtactgagttttcatggcatactaattgctctttattaagagtcatttctgtggctgtcattatgattgtgcaccttgatgtatattgatagagtaaaagatgaaaaggtgagaagaaaatctccctgatatggactgaatgtctgtatccaccctgacccccacccagagtcataagttgaagccctaatttccagtacgatgatatttggaagtaagacctttgggaggtaattaggttatgagggtggagccctcatcaatgggattagtgcccctgtaagaagagacatgcgagagatgatctctttttggccatgggaggacatggtaagaaggtggccttctgcaagccagaaaggaaggtctcaccaggaacggaatcagctagcacctggatcttggacgtccaagtcttcagaattgtgagaaataaatgtctgttctttaagccacccagtctatgatgttgtgttatagcagcctgagctgacaagacactccctgttctctacaccctacgtaggctgctcccttgcaatatttttatgcttgttcagttggccacttagcatcccaatcatttttcttgacatggcccccaggtacccagatgtactggggttttgtgtggagaactgaactgtgcacaggctacacctttggcatgaactgatcctgtaccgaggggtatagaagtgctcccagctgtggcctcctaacttggtttacacagccccgtatacaacacttcagaagtgtgtcatcctcagcctaggatgacgctggctaatggccctgtagggagggaagaggtttgaaagggaatgataattaaagcaacttcagttacattgtggattttctaggatttccaggtacatgttagcatttcctgatcaagaaagttggtgatctcaattctgttttccataaacgcatcatcatggcaaaggctgatggggcagagagacaggatatatgacccttgtatataacccagaagtcagggatgtggtcccgccaccactcgtaccctatcctacgtacataaaactgtcccatatctttactcttgcgggcttttgattttgttttgttgagttctgtgtttattttttgctgtgtacttaaattgattcaataaggcacatgatctgagcaaaaaaagaaagttggtgaaataatagatttatttactaatgtttctgaatctttttcatgtcacagagtgctcagtaaataataatatttgcatggtacactgggtaaacagtctggacatcttttggcctggggcttgggctctgcctggccctgcctggcagctcccaggagtgaggggcatctccacccacttgaaacttactccaaccctggtttagaaccatgaggattcacagttgatgcagtagtagctttatgcattatgcagctttatgcattctatactggcaacttgggttatgattttgcttttgctgtgatttcctagtgtgcttaggactttttgtctgaattatctgatctctaacccagagtcaatatgttacttatcttattagcaactaggcatgctgagagaataaataaattgtgtgtaactctttgagtatcttcaaagtaataccctatgctattacaacggtatcacaaatgttggatcacaaatgtcatttagtccatccttctgtcctctcctcaatcttgttgatagtacagggtagactaaaacatcacagctgggtttctttatttcccctgaatttattaattcgctcctgactgcttttttcttgttttgttttactaagaactttgtgttctggtcctgtccaaggtgcagatggttatgctttcaaaacaccttattgtcataatagcactcatttcaaataatactctactctcagtttcaccatttcaagcactattcatttgattcttgaggagaaggtgatgctcttccactgatcctccaggaagggtctgatcctccaggaaggctccatccacctcgttcctttcccaggttcataaggagggtggcagtgtcaaatgaaccctgtgccaggcactttcacattcagtaaggagagcatgggttttagagtcagacagatctaagtgtgaatttccatctcttcccttttagactctgtaacctcaggacattaactttatgattatgggactgtgtttcatcctatgtaaagtggagctagtggtaactactgggtgtgtgctgccgtgatgatcacaagtgaaccgtcccaaaggggctagcaaacagtgggtgctcaacaaacgatacatataattatcattattgataattctgtaatgcattgtacagagtcagttgttttaccgaacaaaataaattattattgcttgtctaccaactttgtcatttctatttttttttttttttttttgagatggagtcttgctctgtcgcccaggctggagtgcagtggcgtgatcttggctaattgcatcttccgcccccaccccggattcaagcaattctcctgtctcagcctcccaagaagctgggattacaggcgtgcaccaccaggcctggctaacttttgtatttttagtagagacggggtttcaccatgttggccatgctggtctcgaactcctggcctcaagtgatccacccaccttggccccccaatgtgctgggattacaggcgtgagccacaactcccagctatcatttctatttaagaaaccattcatttcagaaaattagttcttaccaaagatgtgttaactgaaataacatttttttcttgctttcattcctctgtcacttctatttttaatgtttcttttattctgatttttaaaaattggcatttggggtcatttttaagttttattcttgtcaaaaacattacacaaacaggtctgtatttcccagggtgaccacctttcaaaaatgcccagctggcccatttccatgcctcagccatgtgcccagttagtcctctgactattatcaacaagttgagaaatttgacctctgatatatcaagaggcacatgcttgatgatttctttccttgattccctgcaaggttcaaaagagggaagctcctcttatcctttatttttggcttccaccttggaactaataagcttagaaaagactttggaaggctatctggttatccctcctgctccatgctgaggagggagcatggcatggagcattggagtcagagctgggtttgaattctctctccgccagttgctagtaatgtgaccgtcataaacttgtgccaggtggcagcaatttgacctttatgaacttgtgcctgtctgggagaaattaaggacttgcggcatgacaatactagctacgtgccttgtctacctgctctatgctaagtatctaccacgcagggtgcttttgtgtctgttatcccatagcttctccacaactgaacaatgtgggtattactaagtccatttttcagatgagaaaatggaggcttagagagttggtaacttgaattacattcactttataaaaattctttactaattttgttttaaagaaactgtgtgagtgggacaagatgtggagaataagaattgagcaagaaataccactttagatttgctttgacattaaagtttttttttaaagcaatttaatccttactgagactgaataatatgtttctactaatgaatgggctgtcagctctaatgataaaacagtgcaaatcagcagtataatggagcaataaatgatttgggtactaacaaaatggcagttatgggctgggtgtggtggctcacgcctgtaatcccagcactttgggaggctgaggtgggcgatcctgaggtcaggagtttgtgaccagcgtggccaacatggtgaaaccccgtttctacaaatacaaaatattagctgggtgtggtggtgtgtgcctgtaatcccagctatttgggaggctgagacaggagaattgcttgaacctgggaggtggagattgtcatgagctgagatcgtgtcactgcactccagcctgggtgacagagtgagactccatctcaaaaaacaaaaacaaaaacaaaccaccaacaacgaaatggcatttatgtagcttagagagtagtttttatctgtagatgcttattatatggttgcttttcaaagaccattgtaaacaaaaatgattctatgactgtaacagaaataggaaactctcagctggtcatcacttctatttggtataagagtggcatcatatgtacttagctggcatttcctgattgactgttggtttttatagaactggaagcagaggcaggaagacttacaaaacagactctgaggtcttcatcaaggctggaatgtggtagtgacagtctgacatgcactgcttttggcttttcttcctttttggctttggctgaagctagtgagctggggggactgtgaaagttaaaacaaatggagagtgtagggaaagtgatctttgctttttctaagactcttcttggcaatgggacttttcttctgatatttacaagaagaaataattctttcttttttaatagtggcatgtaaagtgatccaagtaggtaatagttcataagcaagtcccaaatctccagaagggagatgtcatgatactgaacagctctttaagaagtgagtgatgttttactttggtcttcagaggtctgtgtttatccaaataatggagttttgagataatgagaaaagcaaatgcaaaaagttaccttagacaacatgcgtatgtaatttcttcttagagttggtttgtctcaactggttatggttaattttatttgtgattatctattagaggtaacactggtatttatgctctaatttcagtcacttgtttgatgacctttctaaacaaatacgtgtgctgcttccaacttaattttggaatgccatcactttatatttattatttagttgtttgaaactcaaaatgtatttcactgtagaaagcaatattagaatggtgcttagtgttccagacccattcaaatccgtacaaatctatttcacccataatatacctaaaacagtactattagcactataatattattagtaattttgatactgtgagctaataatctatatgggttgtatcacttagtagctgtgtgaacttgacaacttgcttgcatctttaaatctcagttttatcatctgtaaaagggggatgataatagtagcagctatttcattgacgagtagtcaagcttaaataattcatataaagcacttattatattaaattttattattatttctataatttggccacattttcagaaaattgaactttgtgagttggccttggaacctaagcaacaaatgtaatattacttccttgggaaaaataggtatcctgtgtttggcaagaagggactatgctgtcactgggaacatccttcttcttcttttcccttgtatcccatcaatgtctagtaatacaagggactgtattagtttttggagagtttttattcttctaggatcacagggaagctcacttttctgcagaaacatcacaagagcctctaagtgttcaagtgaaaggaagagtagcacgtctctcactttaagttaaaagctagaaatgattaagcttagtgaggaaggcatctcaaaagccaagataggtcaagagttaggcctcttgccgcaatcgttagttaagttgtgaatgcaaaggaaaagtgcttgaagaaaattagaagtgctactccagtgaatacaccaatgacaagaaagtgaaaacaacccttaagatttatgctaaatctcctctgcctatgctctgaagatggaacagcacagcctagataacagtacatctgtttatagcatgatttactgaatattttaagctcaccgttgagacctactttcaaaattttgctgcttattgacaaagtgcctggttacccaaaagctctgataaagaggtacaaggagatgaatggtggtttttatgtgtgctaaaataactttcattctgcagctcatggatcaaggagtaatttcgactttcaagtcttatatttaaaaacacattttgtaaggcaatagctgtcataaatagtgatttctctgatgggtctgggcaaagtaaattgaaaaccttctgaaaaggatttaccattctagatgccattaaaaacatttatgattcatgggaggatgccaaaatatctacagaaacagaagtttaagaggaagttgattctaatccttatgggtgattttgattcattacttcgatggagaaagtaactgcagaagtgatggacatagcaagagaactagaattagaagtggagcctgaagaagtgactgaattgttacaacctcatgacaaacttgaatggatggggagtcacttctcatggatgagcaaagaaagtgatttcttgagatcgaatctgctcctggtgaagatgctgtgaacattgttgacatgacaacaaaggattgggattcagaatattacataaacctagtcgataaagtagcagcacggtttgagaggattgactccaattttggaaaaagttctactgtgggtaaaatgctgttcaacagcaatgcatgcaacaaagaaatactttgtgaaaggaagaatcaattgatgaggcaaactttattgtccatcagagttgaggcaagaccttccactagcaaaaaattacaacttggtgaaagctctggtgattgttagcattttttagcaatacagaattttaaaattaaggtatgtgcattttttagacataatgctattgcacacaatagacaacagtgtagtataaacgtaacttttatatgcattgggaaacaaaaatttcatgtgactcgctttattgtgatatttgttttattgtggtggagtggaaccgaacctgcaacatctctgacatatgcctctaaagacattaaaaatatatataacctcaccaccattatcatacctaatacaattaataataattccttagtaccgtctaatacccaattaatatccaagctttcttgattgtctcaaaatagttttttaaacagttgatttgtttgaattagcatctcaacccatgtgtcacattagatagttatgtcttatgggtgtcttttttctctcagagttaaggagagtgtttttattttattttatttattttttttaacttttattttaggttttgggggtacatgtgaaggtttgttacataggtaaacgcatgtcatgggagtttgttgcacgtattatttcatcacccatgtattaagcccagtacccaatagttgtcttttctgctcctctccctccttccacactccccgctaaagtagaccccagtgtctgttatttccttctttgtgttcataagttcttgtcatttagctcccacttacaagtgagaacatgcagtatttggttttctgttcctgggttagtttgctgaggataatagcctccagctgcatccatgttcctgcaaaatacatgatcttgttctttttcatggctgcatagcattccatggtatattggtaccaccctttctttatccagtgtcattaacgggcatttaggttgattccatgtctttgctattgtgaatagtgctgcagtgaacattcatgtgcatacgtctttatggtagaatgatttatattcctctgggtatataccgagtaatggaattgctgggttgaatggtagatagttctgcttttaactctttgaggatcaccttactgctttccactgtgaaggacagtgtttttaaattgggatgtaacgtccttccacaatgtggaccactcctgtttgtacaaacaagtggctagaaccaaacacgggatgtcattcttatggcaaaggatgacaagctcagggcattttcccccaaagtgcagtcagtgtaaccatggaatcagaaaactcatagtttaaaacaactttaaatgtattccttttttatttaaggtatcaatttgaatcgtgggtgttaaaaaaaaacaccaacaataagctctatgctattctcatgatatccacatattaatcatctgctttggcatcttctagcactacgtgttgccatccctggggcagatttaggtaggcgaggtttcaagtggcaacaacttgagtcatgaactttggagctagtttggcagaagttgataaagattatattaacaagttaatgcagattggcctttgtcatgagcactgaaacattgctcagcaccttcacaaggcagaagtcaaggtcaaggctctgaaccctcgggatgaagtctcctaaggtgtgttgattcatttttggatctgcagaggattgggtcaagttctgacatggtgctgtaggattctgatccagcagaccccacctgtaacctctgtgctacactagttgtggccccagaaagaccttctaagcaggtttcaggaagcaccttaatggaaatgtttatataatgacagagacttaggtaaagactataagctcgaggaagtatcactctattgcttagaccatccagtggctttctagttgttcagagtaagcactaaagcccttcatacagtagccttccagacccaaagcagcctgcctctcctttaccttcacctctctgattttatctccagccctcctgactcactctgcaccacctactggcctccttgatgttccagtaatcttcctggctatttcctgcctcagggcctttgcatttgctgttctctcacataactgcaagtctcacttccttacccttttcaatctttgatcaactatcactcgttgaggcctttcttaactacctatttaaaactgcaccactacccagtttaaccagcattccctaaatctcttccttgcttacatttttccattgtagtatcaacttttaacacattatgcaacgatttttaaattttgggtattgtctatttcccaccatggattcatccttcgtgcctagaataatgcctagtcatagcagacactcaataaattgaataaatgaatgagtaaatgaattaaactttggaaaattagatcacaagtgtacactgagagatttcttgggaaaaatgaaggataaactttgaacagcattgtggaaagagacattttaataagggaacacagactagagaaatgtcttcaatgttcttgtaatagtgaactgtgctcataaagtttatgagataaaagttgtttttctgcttagtagtgcagcccacgtggtgagtgatgcactcttctggcttttgatacagtagttccttggcatgtgtgaatttaacaattgtgatttcaactatttgctagcagccctagagggtcataccatgtagtgggtttgtgctttggtggacaaccatgtggccaagtggtgagccgaggctgagctggcagatggaaattagatgctgtgtgatacttgtgaattggggaatttgcaaaatgggcctggggaggggatgttcatgaatgtcaagggtctgtatactctttaattattcagtgagtctactctttcactaaaggtctgtttaatatttgtgatcccaggttcctagagtttttatttttgtttttgttttgcactgatactctttttttttttttctgagaccaagcctccctctgtcgcccaggctggagtgcagtggcgcgatctcagctcactgcaagctccacctcctgggttcaggccattctcctgcctcagcctcccgggtagctgggactacaggcacccacccccgcgcctgtctaattttttgtatttttagcagagacgggttttcaccgtggtctcaatttcctgacctcgtgatctgcctgcctcggcctcccaaagtgctggttttacaggcgtgagccaccgtgcccggcctgcactgacattcttttatttgagatgcagagatctgtgctcaatcagggttgagtggaatgggatttaaagaacttatcaagtatataactgagttcaaacagttcaaactattttcaactttacatctgattcccaagaatgaagcagaaaatgaagatgcttgcatgtgggcctcctagattgagtatctggcacaagaaaagcctgcccaaagccaagtaggccgccatttccctttcctttgtagggtgatctcacatccatggtcccttagatccaatgcttttaggagctcgggtcctcacagccctgttccgagactcatgaactcggagtctcaaagcccagatcccattcccacagaagcccgtcttcactgcccgcttctgttcccttccgaactcagattttctcagtctgcttctgcccctcaggaacctgagtcttcgtggccccgtttctgatccttaggagcccggatcttcactgttcctcttctgccacttaggagcccaggtcctcactgccccatttttacctctccggagcccgtgtcttcacacctcattcctttccggtcctctcctcttaggaatgcgggctctcacaatcctgttcctcccagacagatttccctcagatactggagaactcacatccatagccgttccctaagtcccgtctggagcccgggtccctacagccacttcttctctgagcctgatcctctcagtcccttcccaagagcctgaatcctcacagcccatctcatccacaacctggtcctgcgaacactgacccactgtaggtgttggtcctgacttcctcctcccgctcttgttcctcaactgccagagctcaagactccccaagatatttggagagttttaacagatcagtcgaattggctaaaaagaggcagcttgacattgagtgggtaagagaacagattttggagctagtcctcctgggtttgaatcctgacatcaacagttatagccatgtggttttttttgggaatgtgacttaatttctctgtatttcagatatgatggtgataaaaacagtacaaatctcatgggattgttgtattaaatgagctaataatatttgtaaagcaattacaatagtaactaagacatagtaagcactacctaagtgtttgctaaataaaaataaagacattgatttgggggggattgctacaggatgctccggtctttggccagtaggcacaccaaagtggggaaagaggtaagtgatgtaatttgaaattataagaaggcatatatgtatgaagaaatattcttgaagataatccttggtgggcattgattagttaattatgaaagagtatagtagagtggttaaaattgtggactgctaaattagtctgcatgcctggtcttctcatcacatgtactgtgtgattttgggcaaattatttaacttcaaaattagaactttaaagtgggtgtgtgaaaagtccctacctcatggcattgtcatgaagattgaattaaataatcatcacgaagtatttagcttagtacttggcaagtagtaagtatttaaaatgtgactgaaaaaattaatagataatgggccaggtgcggtggctcacgcctgtaatcccagcactttgggaggcctgggtgggtggatcacctgaggtcagtagttggagaccagcctggccaacatggtgaaaccccatctctactaaaaatacacaagttagctgggcatggtggcgcatgcctgtaatcccagctacttgggaggctgaggcaggagaatcgtttgaacccaggaggtggaggttgcggtgagctgagatcgtaccactgcactccagcctgggtgacagaacaagactccgtttaaaaaaaaaaaaaagataatgaaagtccctaatctcagttcctacattgttataggtattgacatcctttagctagaaccttcagttctttccctgttactgagtcagataaaataagatggcatccagaaggaaataatgcatgtatgttgcttagcacactgactgacatgtagcaagaacttaataaaatttcaggagcctcatccctgccagctgggtggtggttcaggatgggagatgtgaacactgtggttgccatgttgggtagaggtaggaaggtttgcctaaacccgtttcagaaggcatcttctccaatgtcagctgtgtgtgtcagaggtgggtgggtcagggggctgtacatgatcaggtgccatggagctgactcccagccctgtgtcctggaacaaactcctgctcttgagtccccatctgcctgccaatctgcatctgatctgagatcactgtgaaatccacagtaaatgtgcaaaagtcacagactacaatgaatatgaattaactgacgattttagttattcatgctattgccgtgctaattactacaaataatttatcactgactgtgtataaacataaaactaagctacaatttctagagcttaaggcttatattgacattttgaatcctaattttatttgcaggtagctgccatccagcttctttataggtttacctaaacacattacagagttttatttgtccagttgcaggcctgatgagcaaaattgaactttcttataactttcctgctgcttctgggtatttattatttttttttagagatagatctcactatgttgcataggccggagtgcagtggctattcacaggcacgattgtaacgcactacagcctcaaagctcctgggctcaagcagtcttcccacctcagccttcctagtagctgggactttaggcatatgccactgtgccaggctttgcttctggctatttaaagtagtttatggtgtgatttatttttaagttcattcattattctgttcgtggaacaaacttttatttagaatcaaatatgtggcaggtccaggtacctcttaatttcttttttagcagacaaggggaaattctcatttgaatttaatttgacccctacatttgagagtatagttatagtctgtgtggagagctaagatctaatgttagtctataaagagaaaattatatagttaaaaatatgcttgaaaaatcccttaattcaaccataaacataatactcttcagggagtatagcacagccattttcccccctttctttggaacaaatcactatttcttcagttgaataacaggctaagtaattggaaatttgcttgtttatggggtttatgttgtttgaaatacacattcagggcctttagacttacagatccacttaataccaaacatgcatgtgccctcactgtgcctatttctaactggttgattgactgatggattgattcatagtcactgaatcaattgattaattgattcattcatagtcactacacatagtcactacacatagttagtagactatgtgtagtgactatgcttgatactagaggtagaaaaacttcagaaagacagtatttgctctcaaagagctcataatgtggtggggacaagagccatgacatgcccaagtacagttgagtgatgataagttataatgacaatgcattgtaacgtgctatatgagaagcaggcacattcaggaagccaatggagaacagaggaaggagcatagctctgctcagggaagggtatgtctgataatgtagagaggcttctggagaggttggatcttaagttgggttttgaagaatgggttaactaagatgatatattaattagaggaaatagcatgtacacgaaggtgtggtggacggttcagggtgtatggcatggggatggtaggacctgagcttacgtttcatgttaagcaagttggatttcatcttccatgtaatgaagaaacactgaaggcactttaaaaggagagataccaaagtgtgttttataaatggatggcttagaggggaatgagttcagatccagggagcccagagagaaaccactggtgagaaggcagatgggaatccagccatcctacactcacatcaaacctgagcattttggggcatccactgactaacagctgccttgcagggtgggctttcagctgtagatattccctttcccgtgattgtcctgtggggtatcatcccttcttccctttgctcttctttccttattctgctgctggtttgggtctggctcttggttgaagagctgatggtggtggggaggaggggacagaggataaacatgcccgtcgccatcctctgtgctggtgtgtcatatggaggagcccagccatttcatcttgcctgattcctgtcttaggacctttctgattttcacacaagaagccttgaagaagggtgattgaaagctaaaagagtttagaagggagcttctttttcctgtctgtaacggtaaaacctctgagaaaatgttggaaggacaaagtatttggtttctgacagaggaaggagactactgtattctacaatggaactctggtcagaagcagcacacggtctttgtggaagcacgtgaaatggtccattaaaaatattaaggagcatgtgagtgtgagtgtaggctaagtcagggaatgtcctgaggagtcatgaatgaagtcctcctttcagcacttcataccctcccccacagcactttctcccttcatctttcaccttccctggtctctgagccttttctcaccccagagtctccattctcctatcaattattttcttgccctttgttgctgagcctgctccagcctttcagaagtcaatcaacaatctgaagacagagtttaggagacttagccctagcatggagaagatggaaagggagagtttgatcctaatagtttgagggacagtttatctgtggtctccccagtcaaaaatcccgtgcatttgctcatgagacagaatcatgacctctgggtctgtaggagtattaatactctattctctgggccctaggaactttatatttgacttaactgaaactggttggatttatttaggaaattatttaattccctaaactaacttctgaagtggtataagctcattttaaaagacactgaagtgagaggttagttaactttctaagcttacacacaaagtgtgcatctgggattttgtattcagttttgcctgattctgcatgtgtgttggtggaccagctgattgtacctgaccaccatgtagaataatgtttctaggggaaattaaaaaacagagttacaaatgagcttttttaaattgaaaattttattgaggtaattgtagattcaaatgcgtatttgagaaattatacagagaggttactggtgcagaaaagctccactttgccagattttcccaaggttaacattttacaaagaggtagtataatgtcataaccagcatattggcactgatacaattcaccaaactttattcacatttcctgttttacttgtactaatttctctctctctcttctctgtctgtattaagttctatacgattttatcacctatgttgatccatgtatccacagataagatactgaatagagccaaccacaggggtccctcgtgttacccttgttaacaacaaatacctccatctttaacccctggcaaacatgaatctgtcctaaatctgtccttcatttctaaaattttgtcactccatataaattgtataatgtagtttgtaaccttttgggatgagcttttctcactcagcataaccccctggaaattcattcaatttggtgtgtgtatcaatagtttgttcatttttcttgctaagcagtatttcatggtatggatgtaccatagtttaaccactctcctgttgaaagacatgtggattaattctggacttttctactatacttaaagctgctgtaaacattcatgtacaggtttttgggtgaacgtaagtttttatttctctgggataagtgcccaagagtacaaatgaacttttaatacagttcataaatccagaattagatttggcgtgatcttgctctgggttgcattttcaccttttatccagttctctcagtctgattttgtgtggggctctcacctatttccctctggccctgggcctgtgtaaatttccaggctgattagggtgctcctgagctctgggaaggagatttgcttcgctttgttgctggctgatctccgggagtcatcactgctatcagtcatgcttgtcagttttgccgcaccgatgtccctttcccccagtatggatgtccagagctccagcggtctgcatagttaagtcagcaactgtgttctgtcttacttcctgtgggaatgaaaggccttcttagagcccctgcgaagtttttttttttttttttttttcccagcccctgtgaaattttaaaaggaatggttgcagctttttcttgccctttggttccctgtagtgaacacatgttgccaaaagatggcagtgcactttgcagccactgagatcgctcttccctgtcgcctggggcttagagaattgtgtcttgttctttatgtgtatgttgaaaatgtgcagagcagattttacaaaacaacaaaagcaccaataaaatgctgtgaagtttagaatcatgaaaaaaaaatcacgtttgcaaatggtttataatggaaatagtcccccacttcttaaacatgatttgaatagggaatagaactcagaaatgtgtgtatgagtgtataattttaggtgtcagtactgattgttatattctgtatagctcctgaaaaagacctgtgaaatgctgatttttgtctttcatctgatccaagattagccaagtaacaggcctgcttttgaactctgagactgcagtcctcaagtaaaggcccttgtatacacttagttttcatggcaaaaatggctaataataaaactcttcacttgctagcattggtcactcccctgtgtgcgtcactttggtgtgcgtctgtgggcatgtgtgtaaagaactgtttaaacattggctatgcaccagaaagctgtgtgaagtgagagattatggggttcaccggatgtcataaacagaccaagctggtgaggataaagtgggatgagttgaaatacaagattagctaataaactttaagctgcatgcacggagagaaccagtgatattaaactctggtatgggcatgttaaacactggtgccctgctgctctctagggtgccatccccgatgccttttgggatggaatcaaaaagccctgctatgaacttgatccatgtgcagcatcgttaagtgcagagcaggctgtggaagagagtgggctagctctgggattgggtatacaagctccggagtggatcctctacacaccagccagtgtgtcaaggttggaggctctgtttcacttcccctgagctcagtaccgcagtcgctttcatcctacagtttacaaagtagctgcaatcctgggtggcagggaaacaggtggcttcacggtaaagcagcaggctttttgctactgcatcctttggcaaaagcttgggctaggaggagaaatgtgctgtgtaaagttttaaccctgaaagcagatgctgttactatagagacaagtgaaatgctacagtgggaggcgtaacaggggagggatgggagaagggaggtgggagggcaagtaaggcgaatctaaaggctagcacactccaagaccttcaacctttagcagcactgtgacggggcaggcttgcattctgaaacttgtgtgctggcggcctgccacgtgctgactggctgagtggcagctgcttgcgctgtgcggactagctggtgagcacgttggcagttggcatgggctctgggggtgggaacttagaggggtggaatgtagatgggtgctcaagacccaatggctgacagttttgcacaaatgtttctcatgctgggcttaagtcacccttacgagcctgctcagtgattaggaccggctggtgaaagccggtccttttggcagtagatatgacatgtgttacagttaaatcattgtggtgtcccagaataacagagaataagaaaaaccttgctttgggtgtggacttctgtagaaagggtataacttgtacggtcagaggcctggctgaaggaaggcattattggccctgagtggattttatactgactggtgtgacccttatccccgtgatgctggtgagaagcttccaaatctattctgaactttgcctcatgctggtgatgtgagcaacccagggagctttttagaaacatgttcttccctttctttgttttcagcgaatgcaggttgtgtgaaaggaacttttaagaatgggtttgagggcctgattaaggactggatgagttaatttcttcctattgatagaaggaggaactagttgggtcagatggttattttaaaagatatctctgtcttactaataatagcaagcaactgctgagaggatttgcggtggggagggacacgaacccaaataattgacatttgtggtgtaaagatgaagaaaaggtgctgaattcctgtattttgtgcagaagcctaggtgcaccaggctggacttacttctaaggaggagtgagggctgctctggagaaaggctgctgtgggtgtacaggttttatattttccatttgcctcactcacctctttttgcttcctacagggaagaggctgctttgagatgctctgcattgtctgtcagaaagaacgaagtttctaattacttgctatgtatagtcttggagggaatgtgaaatatgcatcaaagagccaaggaatgcaccaatcattattctctctctctaattcagatggaacatagtgacagtgcctcagttaggctggatggttttctcagcctaggaagagggtttttctgaacttttctactatcccctccagtttttgctggtttttattttctctttgtttctgtttttcttttttcttttagagatgagaattcactgtgttacccagactggaatgcagtggcctaatcatagctcactgaagtcttgaacttctgggatcaagcagtcctcctatctcagcctcccacgtagctgggacaacaggtgcacaccactgcacatagctaatttggaaaaaaaaatttcagagatgggtcttgctatgttgcccaggctggtctggaactcctggcctcaagcaatcctcccactcggcctcccaaagcattgagattacaggctgagccactgtgtcagcttttcttcttttacttctttggttgttacatgcaattttgggaatggcttaggcacaaggctaaacattttagttaggaaatttgaaaaaaaggcaacaaaagactttaggaccagttcgattaatagtggggtgcagaaatgatgttccacatgaaattgtgttggactctataggttggaaagggttagttctgataggactggaaagggttaatgtgagctaaaccactcttttttctaaaggggagctggcactattaatgtacgtgcagtagcacagggcttcaggattttgttgtgcttctgaggtcttttaagaaaatttcctcattaaactgtcatccttatctatgtctacaaatgtgtaatggatgggttcttgtcttttgaacttatttgcctggattgctaagggtaatctttgagaaggtggatgtgattgcattaggcaccttgtctgtcttgctcactgtaactctagtgccttggcttgtgcctgcaacatagtagtagcatccagtaaatatttactgaatgaatgaatgcaggaaagagaaaagagaactactgaatgcctcctctgtgtctgctactgtgtgtggtatgtaaaaattatatttggcaattagaagacattggtgatcatgaccaaagtgctttttacatctctttccatctttctcagccactcggtagcagtactctccttttgtcacttccttgacatcactcttgcctggattcttacctcattgactgtttttgttcctctgctctgcttgtaaatgttggcatgcctcagcacttggtcttaggtccactccttgatttttacattttcttcctggatgatctcatccagtaatagcttcaggtaccagctttattcattggtttcctaatttttatctctaatcctgagcctctgagctccagactcagacatctacttgtatgtccgatggctcatttttcatgtgtaataagcatcttattcttaaagtggctaaatagaactcttgatttgttccccaacaacttgtttctcccatagccttcccctggctccttcaatattttcttaatttctcttgtccccttactgtccatttttcacatagcagccagggtaatcttttaaaaatgaaaaacagttcaagtcactctccattttagaactcttcattggctcccgtaacacctaaaattctgactccttaccctggttttgtggcccaatcaatatcatctcctaaagttgaccttctagccctgtccagctgtactaactttgtttctgttcctgcaacatcctaaacttgtcttcaccttagagcctttgtacttgctgttccctttgcttggaacacattacctgcaaatattcacagtactgattccttcctgtcatttttgtctctgctcagttgtcatccagaagcctcatgtgaaccaccctgtgccaagcagtccctgcctcattttattttccacaaagtgcttaatgctatctgagattaccttgttcatctattcagtattaattcttgcgaactttgtttctctgattcacagatatatttccctctctctgaagagtatgaggaacatagcaggcactaaataaatatttgctgaaccagtgaatatactttatcatttaatcctcatgggaaccaggggcttagagaagttggtaaatgacttgacttcttaagtcttttcttttttttgagacggagtctcactctttcgcccaggctggagtgcagtggcgctatctcggctcactgcaacctctgcttcctgggttcaagttatcctcctgcctcagcctcccgaggagctgggattacaggcgtgtgccaccgtgcctgctaatttttgtatttttagtggagacggggtttcactgtgttagtcaggcttgtctccaactcctgacctcaagtgatctgcctgccttggcctgccgagggattacaggtgccgggattacaggtgtgagccaccacggccggcctcaaatcttcaaggaattttcttttccaccagaatcttgatggccaacccatatcctgcttgcattcagttttctatttttagtttgagtatagagaaggaaaatgatgtatatcaggatgggctattatatacaaggccgatattattgaaagaagaaatcttgcaagtgtccagaggtaatgagtttcttaatgctattgtccaccattgactggtcagggtgaaaaggaaggaagcagaaaggaaggaaatttacagtaattaaacatgtagtatgtgctgagtcctgcactgtgtgcttttaggtatgttacctaatttgaatctcaaagccatcaatgcatggttgatattattgtgttgagtcaatgcaaggttgatattattaccccagttttatagatggaaaaactgagacttaaaaaagctaaaaactttgctccaggtagcacacttgttcagtggtagagctagatttcttaaaccgggggctacctgacaccaaatttctcactttttatgttatgatggttgctttgtgagatggatatgcttctaaaatagtaaggacaaaaatatgaattcaatgcacatccgcatagattataacaaatatctgaagcacaagaataagttatacagacaatatggaaaacagacctacaatattcaatgcctgagcatataattggatgaatagaatacagaatgaacatttggttctctggcagggctcatgtacggtatgacatagagcagctgtccccagagaaagttctttgtttctagactggtactacacaagcagcatttgagcaattcaggatttctttctgctttcactataaatagacctcatggaattctgtatatcaaagttaatgcaatgaaaaggagctgcagaatatggaaataaaccttaactcattctataaactagaagcgtgtttggcatcgggaggccctaaaaacgctgtcattccttggatggattctgaggtcttatttagcatatgaaattgcagagtagatcctattatgtaaggagacaggaggacagcataatgtggttacaaaatgaagaactttgtgcccttcagggaagagttaacagggcagatatacatagagaaagatgtgtgataagaatgtggaaaatgaatgaatgggtggcatgtatctgtgtgtattgtcgaagccgggttgctggataatcctcagatgtcagatttccgtaaggccagcatgtgactcaaagcttgccactcaacagagaatactgggctgtgctgatattaagaggctggctggaagctaggctcccactgtgcactagcctacctccctgtcgctctctgcgtgtgggtgggtgtgcatgtgtgtgtgtgtgagggtatacattttatgcagtgggtgtttaaagagctaagcactgaagctggatttccacaaacgatcatcacgagcactccagacacaccaaacttcctctcttggtattttttttttttttttgctttcatcctttttaaaaagaattttaaaaccctaaaggggagagcccccaacatcctgcctacaggattgggattattttctcttacctgtctatgtgggtgccctctcaaggttagaactgaagctatgtgggaccggcatattctcgagcaccagatgagaggagctgcgtgaagcagtagcagacaccagaagaagagtgactctgccctgctaacatgaacaacagcttgcaggttaacctgcccagaagctgggctgctccaagtggctcgctccaggagaagtctgagcattctttttttcttttttattactataggatggaggatgaagctgtcctggacagaggggcttccttcctcaagcatgtgtgtgatgaagaagaagtagaaggtgagctttatgggtctgggaaagtgtctgttgacatacatatgtctctatagataataacattcatgcatttcatatatcttacatttttaaaatgaaacaccaaaccttttctatagagtttcatcaatctctacatttgcttcaacacagaaagtaattttaagaacttcactggaccatcaaaatctgattcaatatgggtcttgcctggtttaaaaaaagtcttattttaaagtaagtgcctatgttagctgtgcctcttcatcaaaaataaacattttaccagataatactaaccaccttccaatgactaattcaagaaagctgctcgatttatataaatatattcagcagcatctttaatattctttcttgtagcttgtagtgtaaagatatagatactacagaaggataatgataccattgttgcaggagaaatgggtttaagctgaagatgttaagagtgataatcatggatgactgtcagttaggaaaagatggacaagcattttttatttaaaaaacttcagtctcttttgctgatgtttcctagtgcctgttaaaaactaaagaagagttatgttttacctggtgctataatactttcagcgggcattcccttttcctgtctcctgacttatcaataatgtgggaataatgctatttatttgatagaaggcaaagctgaattaatatttattaaaataattatatgaaggcatcacagatatatgttattattcatatttataatgagatttttaaaaatcagggttataggcaatactcaaagttaaatgaaacttgcaggtgaatcatgtgatcaattccaccatttaaagtcacctgagagacaattcatttgtgttttggagattctgacctgaccggtgccatgtggtaagcatttagtgccagccccaaacttgaaccagaaggtggtgggcttgggaaaaagagagtcagtattgtatgttctggagtgattcttcaagcagactgagcaccaggtactgggcaagtgatgctcctgtgccacttggaacagtttgaatagtgtggctatcatgttgtttctcatgtttctttagtaagtttcttcatcccatgtggtgttagaggattggcgcctccacccgcccccctcaacttcccgcatttatgctcttgagactgactaataagaatttgatgcctaagtttcttaggaaaacggaaactacagtattttctttcatattgttttatgggttccttgcatttttgcaacatgctgtgggaaaatgtcaagctggtgaaagcaaaatagtaaaacttttgtcttaagattcttggaacccatgatgttaaatcatcattttagtgactctgtcactgtcccagtgtcaaagaggagataccagcaaagaggagatacaagcaaagaggagttatagcatatgaatataagaaataatgtagctttgagcaaatagcctatagttttaagacaattgaagtagaaaaagcttgggagtgacatatactgtgtgcgtgtgttttcctttgagaataatgttctagctaggttcacaagagatgtaaatcacttcttgagtttgtaaggtctgtaggattgacagtactctactgaaataggatattgtatactgtttcttaaggctttgactaaaaagtgcgtttcctgaactatttcccttgattttcaagcacaaaattaagacgacaatataaatgaatagcacacaaatctgtagccaggattctttaagaagaaacagaaacacaaccaaaggtggtagaaacatctgtaaaattcaagaaatgtgttggttttgtgatgattaaaccgtccaaatggatttgtgtgttttcctgtttttatgagacctctattttagtgactgtctttcatgttgattggcacctgagctgactacatttcttccaagacatgctcagatagttgccggttgctgagtcctgagccccataagaagattgcttatggattattttgtgggtaactttcaacagtgctgactgtcttacagtactagccttgaaattatagtaattgctcatttgaaatgaacaaaattgttcatttttaatttggtgttctcccaattgaccctccccctttttcaccttgctttattggtgggggtgggaggtcttagatttttatagtagctctaggtgatagtataaaacggttgaaatggacaggggttttttggcacatccatggttccagtgattgagaatgaagaaacagacggcctatgttaagacctctaagaagtattcacattttgaggggaatgttttttcccaaggatatgagtccatctcatatttttaattgcatagagaagagtgtatctgaagaaaagcaaactgttatctctattctaaagtagcttcctggcacatttatggcagaagtgaatgcctcagttttaagggtcagaattcaaaaggcaaggagctggaacactttatattattatttacattttcttttatgaaagtagttatttctgttgcttctaggataaacatagaagtttacaatgtttgtaaacattcttggcaaagtcaacttaaaataaaactttgttttttacagttatctgcataaataagatgtactcccaataagtgattattaaagtaactaaggtctgatagttcttgttactttgaaatatttgtgctttaaaagtgcttagggtcccctaatttggggtgattggagtcagctcaacctgaaggcaagaagagccagatactctctcttagttgcttcgaatgctgtggttctgaggagagagacttcaaaccacgccctcagttcaccttgttcaactttactctcagtgggtggcatgacacttaatccacattctaaaaacttaatagaaaaccatcaactgcaaaactcactaagcacagagtgagtcacaagaggagtcatctgtttaagtaatgaatttatctatgtggcatatatttaaaggcctaaacctcattgtcacataattttcttcatgtgttaatggcttaaagagatactctttcaaaatgaaaccaagtgccaattttaatctttaaaataaatagaagcctttaaatctgctcttccactggttaccttgtactatgcgtggttttaaagttaacatttttaggaggagaggggttactgtggataaactcattttaaaatgtcagtatttcagatattcatatttatttctttatcaaaatgccccagctcccacccaggcccttccacgcttccacagaattggtctgtagatgacaaattaacattaccagaatgatccataagtgttgaccacgaggaacaaccactcacttttcgtttcaaacatagatgggggaaattgctaattacgtagcaattacgtagtgattgctaattacgtagtgaatgaagattgagataggaagagtcagtcccaggtaactttttccaaaaacagaagaaaatcctatggatgttttattcctaaaaaagccagccagaattttggatctgtatgatataaacagattacttaatagtctcatattttgcaataggggaaaagagcaaactccaccttatcctttgagataaggctttggctctgcaaggctaggtaactcccagcaggccttggcaactctgacttcatgaggaggggcctcttcttaacatcaagttcaaccaacaactcagaaaatataagatgcagtaacacagtattggttgaaatgtgtctccatttttgaggcttggtcagtactctcctagagctattatgctatattgtgctggttttcctcttccattcaaaacttaatgcagtgggaagtatgcacccatctgtcccaatggaagaataattctacaaattcacatgtctactgatggacattaggagggagtgttgttgaaaatgcatggaatttacaggaggattgttttcaggaaaagtaaaaaaagtatgtcagggtctgggacagggtagatattcactaattatttgttaagagaaagaatgaataaatgaatgtataacataaactaaataaagcatatgtagaatcactttgtataatactctgacatattttttaaatttttttgttagaaatttggttctcaaagcctgacgtggtggtcatgcctataatcctagcactttgggaggccaaggtgggaggatcacttgagggcaggaattcaagaacatcccagaaaacatggcaaaaccccatgtctacagagaaataaaaaaaaaaatagctgggtgttgtgcatgcctgtagtcccagctactcaggaggttgaggtgggagaatcgtttgagcccaggagatcaaggctacagtgaactgtgattgtgtcactgcactccagcctgggtgacagagtgataccctgcctcaaaaaaagaaaagagaaaaggaaaagaaaaaagaagttttgttatcttagtactcttattctaatgaaatgatatagcctctcatcttatccttggtattactcctgcttgattttgcagagatcattatcatacttatatcatttatatatttatactgataagaaaaagaaggtcctaaacacctctgctttatcaaactttttcattctcctactctgttttttgaagagagagactaaaataatgaaatggtggcttttgtctttttggaagtcaagacctcaacattttacagacatgaaatcatgacttaaacctatttcttgctagaggatatgatgatcatctactcgtgtactggagaaggtagtatttttttctaaaaaaactggggcctggtagacattttttaattattacaatggtataaaacgtaatttctgagaaggagtgaatgaaaacctatcggatgggcagggaggggccaagttgggactggggctattctgagcgctggatataagtgtccggttgcattttgctgacctcttctctgctgttcactctaattgctcagaaaaacagtgtgtacagaggaaactcttgggcaaatactgctaaaggaaaagccttcttaaaaggaaacaatgtatccacacattggcccactttaaagaaatacagtgaggtttttaaaagttggtacttgaatagtaacataggtttcccagaacaggttgagcccatacagacctttcccagcttcctgctcctttctcctcatggcctcagctgaacgctggccagaggtcctcaagtatgcagcacttagctctgtagctgcctgacatctcttgctgtgtcagggaagttaaatatttatatatagatttctttcacttcaaggaaggctgatgatagttccgtgtgtttttgaaactagaatcagacatttcttctgagaatttgagaattttccaactgcagagaattccctggtagtatagtatcggccaaagccctcttgaagccatttcctatcctaggtgttggtgttctttgatggcaataagccataccaaattgcacgtggtacttgcattgtgtttggcaaggatccagaaattctgaaatagtacacttatagcagttttgcctatagattgagcttctttttagaagctttttatctggtcatattagtgagacatgttgtttgatatttattttggggagtctctattgtttattttattcaagtgttgtcaaagcagaggcactaagtatcagtttgagaataaaaatttaaaacttgctctattgccaaatcattgcataggtgaaggaagcaacttatagtttagattatgggtttttctctttgtaaaatgggagcaatggagcatgtcattcaccttagaactcttaagaacttccaacagcaattgctgctgtacctggcattaggaacaggagtgctttatactccaccactgtctgttgtttttctttctgatggatacagcctcaccaataattttctttggttattataatcttctttggttattataattttcttttaattacttaattaattattttcttataatttagttattataattttcttataattttatataattttctttggttattataatcttttctacaaatcgtaactggtgtaaatattgtttacttgcttaattcatttctccctacatctagcctttgccttcctaaccatacttacctactgcttcttatattggaaaactaaagccagaatgatccattgaaacttcccaaggcttactctctgtttgcctttggactcattctcatcctttaagctctgggtatgaaatctaattttcacagttagactgctctgatacacattatccttaatttgttaaattgtctttttttccaagaagagggatattaaccataattgtatactgggtaaaacgcaaatcttgtccattgtataataaagcctgcaatgttgcttcatttggaaaatggattcaagaatgtagtgtttttctgcgagtgagaaggattcaagagtctagtatgtgtatatgtatttaaacatgcatatagaaatgcatttccccttgtctgccacatagactagaatacttctgcttcctactggccattatgtaatttaggtgccaattaaatgagattatgcaacagtatggaaatactactatatattctaacctgaactaaatatttccccttttttatcaccatgagattagaaatcattgggagaactgagaattgggcctgatgagaatgagtaaaataagaatataataaagatcagttgaggctttcttgttgctgtcatgagcttgctggtgagattttattttattttgttttattttattttactcttttggctgattgcatttaggtgactgaggtgagagcctgcaatggcataggttcacgggaggttccaacattcatccctggatctgctgattgccaggtgggatgaaaggtgaaggtagtgagggtggtgagtgacatccactgaatcagcagtatagatgacttaaataattcatttctctgaatagctgaaaagttttcaaatctggtaaattgtttctgcctttccatagagttagaattagaaggcagctatccaaagggctatatccaatgtgtgtacctttcttcatattctgttgatttttggaagaacagactctacttagacctcatgaaatattattttagtgactattttcatggtggaatgctcagtaacttttaccaggccaaaaacttccgggaataaaaagaggttttaaattttagtaacattggccagtatatcagctttagaggaatggaattacattgttatagatgggttaaatcactacccaacccccaattgattattaaattttcaacaggaaatttgattcctactgaaaaataaagaaaatgtcttcaaggtagaatgaaagcccatgattgaatctaatggatacgtgtgtttgacaaattaaattagtatctgattattcaagtttttactcgcttttattccttctgttctatggtttagagaacatggtggtggaccagtagtctcaggacctttttctgttcctggtctgccactgcctttctgcataatacaaggcaaatcattgtcatgtggttatggttccttcatgcaaagtgcagtgagtaacccatcttcttagccacctactagaaatgctctaagaatttttggataatacctgaaaaataccttgatacttccagtaagccattaagaagttacttaatttctgaatctcagttttttgtacaagatagaatttgcacctctcatctcctacttttttctaggaatataagtaaagcaatttgaaatcccccaggattaaccgcataaatttaaggtattatctcccttgcaggtaattgttgtatgtaatttatctttatgtgcaacactttctcaccagtggttgctgtgactgcagaacactttcacactaaagctaatactaatatctggtaatcaacagattagttgattagtacttacgttaactcttcttactaaatttaagtaactgatggaccatgctttttttttttttctttaagccgatcaaaatggtaagaacagttgcaggtgtgacctctaatatgttgcttttccaggcttatgtgtatcattgaatgtgataacattgtaactaggaccatgattattgtttagtcaaataaaccagccattatttaaggacacaaggttagttgacatggtaattttagagatgtatcacatacgtaggtgagtttacatggaaggccagggaatatatctcctacagaataacattaaattgagacctaaaagaggaaaaggaatttgctaggtgaagaatcagggaagcattccaggcaggcatgtgtgaaggtccagaggtgagaaagaggtaggcccatttgagaaacagaaataaggctacagtagctggaccatgtgaacagggggagagttctgaggtggataggacccagataactcaaggtcttttatgttatgctaaatattagcattttattgagtgtgcactaaggaaacattgcagaagggttttaagcaaggaagtgataagaccaaatttgtattttagaaaagattcctttggctgctggatggagacagtgtcccaagagggcaaagacagaagtgtgggggctgttgccaagattcaactgagagatgattttgggttggacaagagtggggacaaaaaagatggagacaaatgtgttgaattgatgggtggatgtatggatggggatggctgcttctggatttctgttatgagcaatttaggggatcatgtaccattttgtaagatggggaacagtggaggaagagtggtgggggatgataggagtttagccttttgtatatattgaatttgaagcacctgtgagataccgcagtagaactctgaagccggtagttgactatacaagcaggaactaagaagaaaggacagggatggagatataaatctgggagtcctaggcatatagctagcatttaaagccataggaatggatgatattgcccagggtcaaagaatggagtgagaagaggactcgattggactctgcaagtgccaacatttggagattaacaaagtgcagtcatagaagtaggaggaaaactgggaagagggtgaagcctctgaggccgagaagagggcttttaataaggagctagcaattgacagtgctgaatgctgccttgaagtctggtaagatgaggattaaatagtagctactggatttggcaaaaagaaggtgattggtaacttttgttaacaatgtgggtgtcatggttagttgggaataagagtgcccaagagaaaactatcattatgagaagttaggaagagactttgaggtgatgctggaaaacgtttagcctttccctctatgtgctccacttcacttaactaattaaaacatttggaattattatagatgttttagaactagaaaggatcttagagaaaatttagttcaataggctagaggaaccatgaagaagttaaatgatttcctcgaggtaaccttggtaggagttggaataactaggacaaggatccacgtgttctgactttcccaaggctgtgctcatcccaaaagagtgtgcttgaggttgactccctctgcagaggaaaaggaatttaggtagggagatggatgagaactaggagaagcacctggaagaacaggaagtggaaagacctgaaaggaataaaaggtgttgaaagagcttacagagaggtgagagggaaagaagacataagactggctgcagcatttgaatgacccctggtagtaagtgggaagacagatgtcccagctagaacattgtcatattttggagcagtttatggaactaagggtggtggatttcaatttgtcattctgtatctctaagacaaacatttccagagaatcctgagcccatttttcccttctcaataattactaacttgaaaggattaatcgttattattcttttggctgttttttccagacagtggaggatgggagggatgggtggaggactggtaccatgatagtggaaaaatgggaaaggaaggcttatatatccaggggcactaggagtcctagtctctatacgtcattaattgcctatttgactttagttagatcactggtaaatgaagaggctgaaccggttaaagtgatttttaggccactttaaaagtgtgattatgtgctgctgtgtcaatgaatgtcgtccctctttttcctgggtgcatgtggaaaaccacagtattgaagattctgggattctaggttaacagaagtctctcatagcatttttcctagttctgggtaattgttatagccctatggtattatctacatctcatttacctacatatgtgtatatgaaggaagggaataatgtgaactttaatatttatattttataacaaatataaattaatatttaatatattaaatatttacatcaatattttatataagatataatatttaaaaatatgttcatctactaatacaatataagatatataaccatatgtaatattttgcatatatgatatataattatgataatagattaacatatattaaaatatataatatttatatattatattaaatagttgatacctgattagccatgagtgtattgactatattgcagattacctgtctatagcaaccaaggacccttcatcctattgcccagccagggcttaggccactgcaaaaagagaagccataatagagtcagagatggacaatgtggttggaatgagagtgtgaacgtgtgcatttatgtgtctctctaagctgcctctctggctgcaattgcaaatccagttatcaatgaccactgaattagctattgtttttttatcttccaaccctacttcccattcagttgtgcaaatggtgaccaaagagaaatgttggaaactgtcagttctctgtgtttggctcacaggtggattttgtctgacagcatgtgtactgcatattacaatgcagtagcccgtgtggggtggttctgggtgtcgggataagtggagggttcatgtcttcccgttgggtggcttctgctcactctgagcactgttctgcctagtgctggacttcctaggccttttggctctattctgtctcgttggagcaagtacaaggacttacagacctgtttcctgcagattggcagtgagccattgaaagctctgggggaaactttgcccaaatcagggtggagattgccaagcccttgcttctggacagagttagggaagattgaggttatggaaggtgctgcctttgttgaagagctcaactctgtaggatggctaaaactgccgattaagggacaagttaagaataggtctgaggttgactcttttgccctcctctaggtgaatgttctggagaacaaagagtgttcacaagttagttattatcagggctggaggtgggtgggaatgagaaaaaactgtgctctgtttttttctcctttgaaaagggaagggagaaataggatcaacatttatgcagcacctttgtgtaccagacacagtgggagactatgtttaattcagaatgtgcattaaataaatatatatttatatataatctctctataaagattatatagagatagatatatagatatttgtataggtaaatttatatctatatagatataattatatagatatagatacattttgtatctatagatatgaaagattttgctagagcaaagttaacattattttggagaatcaactttgaagattgaaaagctcttcaggaactgcagtttacatagggtaacctgatttctaattttgttaattccttaaggtagattcctgaagtaactttaaggggaaattcttgtttttctagctaagatcttttcaaataattgatgatcactgaacataataaagttgtatttctataaacatattcactaattcagactttatagagtgccagtcagtttttgcctttactatcagccattaataatggaaacttcaaaggaagcttaacttcagtatgtggtcttaggcgcctcaccttcatctaagactataattaatagaactgttttattaaaaatgagctcttggaagacagatgcatacgtttgctgagctaaaggacaggagtctagctaacaatcataagcttgtgtctcctttgagaccttttattctgtagctcttagttcttgcctagagattgttatcactattattatcatcatcaaatattaaatattaatagtgctgtgctcagtgaacatcaagtaacaagctaagatttcttatcagtcttgcttggggaacctcaggttgccttgaggatttctgggaggctttcagtatataaaattcccatgcagttcagtgggaagaaaagtatttccctgtttttcatcacatttgtcatttgcttgcatgcctggtcctgtgtaataggtagcgttaaaattaaaataaattacttatcagtattcaaaattatctatacataaatgacatatgtaatacgtaattatctattaataaacacattattttttatgtaaaaaaattgcccttatccatatataaaaatagaaatcatcccttgttctgagtctggaccctcatgcaaaatttcataaagggctggtttaccccctggtaactgcaaaattatgctgtgctttttgaagggggttttcttctcatgagctggtatttataccagtaaattagcaatgttactttgcttgtatcttattagagctgcttatggacactcttatgggtttgagaataataagctaacaaattacttgtattttggctgagcgtggtggcttgtgcctgtaatcctagcactttgggaggccgaagtgagtggatcacttgaggtcaggagttcaaaaccagcctggccaacatggtgaaaccccacctctaccaaaaatacaaaaaaactagttgggcatgatggcacatgcctgtgatactcaggaggctgaggcaggagaatcacttgaactggggaggcagaggctgcagtgagccgagatcgtgctactgcactccagcctgggcaacagagcgagactctgtctcaaaaaaaaaaaaaatcacttgtatattattaaagtgtttaggattatacatacttgtccatttcttgttaaataaaagtgtcaaccacacagtgtccactgtgcctggacttgatactgtagtttggtttaagttttcttatgcatatacttttaactgagatttttttttggtccaacaagtaaagtctttgcagcatctttttataatctgtcactcatccagggtctccgcctcttctacatttttcttttcttaataaaaaaaaataaatctcttaattttgttctacctacattcctcttggcaatagctacaacatgtcttgggcatcttggcagaagaccaggttatattagataagccagggaaggcagtatttaactcatattttgggaatattgctgattagttctgaaagaagtatataaaatgctgcatgttgtagaatctttgctttgaactggagagaacagaaattcagctgaaagagtaagagtgtggctataaatcaaatctggaacatccctcagtgtttaattagagatgtatgtaagaggctggaggtaggggatggatggtgggaggtggggaaaggtagacttctgggtaaagattttacctgtcctttggtgatcctttagatagaatacagtactgacatatcaggttaaaaaattatatactaccttattccaaaaagctttagggtgaagggaaagtaactgttgaaaagttggaagaatgaggttgtgtataaaatgcacgtcatgaaactctatatgctcactacgggtttgcctaaaatttgtctattctcttgttagcagccaatgaggaaggtgacataataagttattaaatttatgatataaatatagtatgttttacagaacacaccatcaaagtagtgatgaagcactgtactagtcttgatactgagaacagagacatatttctcctgtggggttttatgaagagaacacttcatacaaagttaaatggttataatgtccttggcttcctcaaactgtggtttttgcacctgtacaatggggataggagcaggattgcatgaggaggtagatataaaacacctcgcagtgcttggcatgcttgtaagtattcactaaatagttgctatcatctgtatgtacagtaaacacagcaacatgtttcccaggaaggagctaatagatgtatcttacatatagaggcatatgttgttaaccatccactcagctatagaatttgtagtttggctgatctaaaacccttttctggcttgaaggttttcatacttcaaagtgttaaatcatccttggtagcaaaatgtgtatttgtgaaagccaccttaatttgaatggctccagagttactaagtgtaagttttttgtttgccagaaaacattgtagcaactatgagaagtatgaagttaggttagaaatatttcaggaattgggataattggatgagttaacatcatagtacttcctacttgcaactggggtggagcatgtaaggatgggaagaaacaagaatcacgtagtgatcatttctgacattcagagatacccaggaaagccatgttttctttccagtagtactggctgtggtacggattgggagatattcccaagatatttagagtttgttgggaacttgcaccatctgtcagagaaaggcatgcagggtatttatttgaacacatgatactgaagccactgccaaatcaaggactgaatgctctttgacagcacacctaaatgaacactgtcaaatgtagattccagtagttttacttcatgaagtttcagtagcaagaatgtaacatttattttgataacatttaaaacgatcacttcttcctcatacattatagctcttaaaattttttccactcctcctttttacattatctttggaagcagtatttcctgagttttctagtggagaatttttttttagcctaaaaagttctgtataagaagcaggttaactatccctgattctttaatggtcttactgttttgtagtcccttgctgggttggaaagcttgtctgtcaagtttctccttttcatattacagggaaaacaatactatatcctcagctttgtgactcccctaagaacttgcagtcattttatgagttataattttaaaaatagtcatcagtcttcatgacatatcccttaaacaggtaaagagattttaatgaaaataaatattgagatccacatgtgatgttctcatcaatcatagcatattttcaacagtaatgatgcttctattgatcatgatgacagatattctgtgggggcagtgagaaagcttccattacagctcattttactttcggtgttttggttacttggcacatatagcttattaagtatttgattgtccctttgagacagcatgtctgtattaccccatccaccaaagcaaggctatcttgctctcttcttataggcaaggaagctgaagtgagagaggctgagaagtaactgatggagcagaaagcactgtccctgagcccctcaaggtttgcttaaccatggaactatgttccttgtcctctacctgaacacaagacagaaaaggaaaatttagttaccaatcacatgtgagaggaggaggatgctttaagttttgaattgctcagctcagtggcttgatttcctctggcagttgttggaaggcaatatcttcctcatccagggaatattgtattttattgtgctgtaaggatgtctacaaaaagttcattgccatatgagtactagagaatggtagcttcgcagaggccatcactaagagttttaaaacgtggtcaagagtggttgcattagacaggagtgggaacagagagtgactgcaaatggatatgagggatctttttggattggtggaaatgttctaaaattggattatgatgatcgttgcacaactctgtaaatatactaaaatcattgactgtatcattaaaatgagtggattttattgtttataaattacaccccagtaaaggtgattttaaaatgcctaaaatttggcatgtcttgagaggaacaacatttctgcttgacctctgggcaccatagcacttcacagtgcagtgtcaattctgaacgctcccacacctgtgtggaagtgcacagggaaaaccaagaaggaggagttggaggaaatggggatagacagaatctgttgctgagaggatgcctatcatcacgatgtgaacaaaatggcaccacttatgtgataatgacaactcaaagtaggttccaaaaagtcaagtgcatttctctccagggtttgatggctcactctctgaactggcctaactctttcattagattgaccatgatgacacttcctagccagtaatcttaccttagcatcttatccacccatatagactgtctattaaatgatttgatcaaatgtactatgcagatttgggtaaatataatttaaaaaacctttctatataacatcatatggcaatatagcttaattaccattttttgcttagccgccatatttaataaggtgaatagaaaatatttaatgtgataggtttaaaaaaatttttcaacctcttaatttgtgtgtgttttcttgaaaacaaccaagcatttcgtgtttgatttattgaagcaattggttggctttgctcacttacattgttaagacttgagataaaacttcaggactccctcagtaactggagcacaggaaacaattgacactgtttcttaattcacattgtttctgagacatttcctacttcctagtataatatagctttcccatgagaaccatttgcttgcaaatggttacacatgatagatacacttctcactggcacacattctgtggggagaatttcactgtgttttgtagtagctgagttgctgcgtgtgtgttgggaaggaggtcctgctttatgtaaagatgcctccaacttcattcaagcatctgatgtcttcttttgaatactaacccattcacttaggttctgcattgcttagctggaatatctttcctgaaggagcatataattctttgaagcctgccaatttaaggaaacacccctgccaattatggtgtttttagatataccccgtaggttactgtggaaagtagttcatgacagtttgtatcatacatactgtatgtacatgtatttgcatgtaggtacgtgatattggctgtggcattgcaaagttgtcatcaaggaataattccggaaatgggaaataaaacccatagatgagaaaatctaatctaatttgcagttcagacaaaaatgttcacattatttctcaaatggtagttcctaaaatacagaagttatgctgtatttaaagtgaaagtagaagtttttcaatttaaaaaatgatgtggaactttgagtttctttcttttttgtcttattagattttgtaaaaataataccacttgtcagttttgcagctccttccatctagagagctgaaagcatttcacaatcttttttcctcatgcccttctcttcaaggcaatttttgctgggctcggtttatttttatcattgcaacaaccagtttttagaaacttttggaaatgaaaaaagaaaaatgagaatggcactgtagctgacattcattttagctgtttcctagtgtgaacgtttgagtatttctaaaatcttttctccaagtatgtcttatttttctcagtttgtcccagttctaagtctctattttgctgattaggtaaaaaaaaaaaaaagttttaatgtaaagccttacccccagcaaaatgactttttgaactttgataaatctttatttttgcagcgccagcagctccttttccagcaggcactaaccctacccagtataatcatagactcatgtaaggctgaaactggagggccctctagggattacccagtttaagtctctccttctagaaatgatgagaggcccagagtggttaagagatacatgcttaaggtcagacaactaattgatggcagagtatgacaaacatgaaggattcctgatttccagtttgatattccttggttttcctaaacaaaagtagtctatctggacagaattagagtacactctcacagagtcctagtgtcagccactagcttgaattatactgaagctaattgaaaattgggaggaaattttatttttctagagtttgccaaatatagaatggtaacgttgaatttatagacattttcttctgatctgtgtatcttgtgcaatttgtctgcagtagagaatgtggtttgaactgactggtgatttgtgtaccttccttaggccaccataccatttacatcggagtccatgtgccgaagagttacaggagaaggagacgtcacaagagaaagacagggcacaaagaaaagaaggaaaaggagagaatctctgagaactactctgacaaatcagatattgaaaatgctgatgaatccagcagcagcatcctaaaacctctcagtgagtactctctgagcgttggtgcctctctctgcctcactcccacatctttgagaaggacacctttttgaatcttgtggctaaaggggagggacactgtaatactgagatgtttagaatctgttctaaaggataatgtctgtggagatgctttgcttgtaccagcaggttaatctaggaggtcatctggtaagattctgagttgatcagaaaaggcctgactaagtttaggcatagctgtgtattctacatttttatgtgtaatagggtagtattgcagatggtatttaactacagcaataaacagtaactggaagactcttaaagaattttttgcatggtttatgcttagaaataggttctgttgagacagcaggtgaagatgagagtgtatgtctatatatttacatatcttaccaaatgtcagcattacaggtgacataaaaccaggttatgagtcaggtcagtgatttaaataggaattgtggaaaatcatcctgtaagagagatctgtagagtgacacagttgttaagatgttgaatgtattagatgtcatacactggataaaagtgttactaagagcagaatagcaggaggtcaaagaacacccttgaattcaagtgataggataggctgtgtgtttagatgtatgtttatgttgctttttgtttctttaatgtggagaatatttggctacatgggccaaatattgtggctgaactgagaatgaatatgtgcagtagaaacacatgccaattttggaagattccccaacaggagttacacagtgacagcttttcatgttggcagagctctgtacattcttcatgtctttgctacagttgcagaaatatggaccctgcaataaaatgcattatggatggcacagataaagatcgggttcagtcattgcagttgatgacaggccaaattagaatgaacagctcaagggtgttgaaaagtgaatttacagagttaaattaaagagggtgtgaggcatagtgatgtgaattttttatagtctcaccgttggaactgagcaggtggcttaggaagctagagaagtgcggtgctaagaggagaaatacaggtggaccatcgaattaaagacagaagcttggaggggagcttgagatggatcatgaaatctaaattaaaagcattgaaataaatttaagacttagaaggaccagaaggcaggagactcaagttatgtacttttcactgaagtactgggggaaggtctgtctgaaagggatcctttacatatcgattaaggtagtggagtctgttttgagaaaaggccttaaaatgcacataaacatggcacagttaatagtctggaggaacaaaagataacattcttttccaaataaatgactaccatttatcttgatttactctgtatccatctgtcaaggcctgagccagtgtcaagtgttctgtccattgtgcatgtgattgtctactctctctctttctctcctctctgtgtcttttataacttgtctttcattcttcagattagaacaagagtgcatcatcactattaatgttaaaaagtaaagaggtgctcacctagacaaataggcccaggaattttgagattaaaattatatatcagcttttgagaagggcagtggaaacagtgccagcagcactcagataggtcataaggaatgaacagatcaggaagatgctgagaccgcatgtgtatcaaccatagaatactgttgcattctgtggcatttggggaccagtttgaatacagcatttaaaataaacaaggcaatccattctctttcccctcagaggtttcttcctgggggaatactgcattatgttgtatactggttttctgaagggatcctatggagagacagttgttaaggactaaattgttcagtgatcataaaaaaattatttataagtatgcattttaccgttttgttcctgctgatcaatgttatacactaatatgcctttggcatatttgatatgagttatccaatttgacatgaagattctcttagaaattgctgtatatcctcagctgctttgatggattggtagttaattatttggtacagttctgtttaaaagtcagagtttttgcacctagatatagaaagacatttaaccccatgattttgggggaagccatagggctctggcaccaacatgatgacaaaattgttgtgggaaaactgaatgaaatacttgcctactatactattattgtctctcaagaacagccacataacagtttctgttgttctgtgacctatggtgtttgagttgcttatgtccatagacataccacgtcccatagacaaggttcccacatgtgtctggcagtgcgcgatgtgatgcttatacttctgagaaaaacaaaaaccaaaaagcccacatataaatagtaacttgatgggagtcatctttgattctttccttgctctcaccctcatatgcaatccttcaatgatttctgttggttcaacatttaaaatagatctgaatttttctgttcttttcagttttgcggtcacatttttgtccagggaatcatcacctcttgcatagacactgcagcagtctctgctttttaagtatttcttcatagagaggcaccattgatcatcataaagtgtaaattggatcatgtccttcctctgctgaaaacttcccattgtcctaagaataaaacctcaattgggcatcatggcccagtgtctttctagtcctgtgatgtgccattctctccttgctcactttactccagatacattgatattggagttccttggtgctaaaaccttttctgcctcagggcctttgttcatgcaaacttgtcttcctgaaatggtcagcccattcttgtcctggttagtttttctgttcctgtatgttctggcttttaaattttacctcttcagagagtcctttccttactactctctctagtgcagattccccttcattattctttcccaacgccttatgtttccttcagaatatatgttttaacatgtgatttttgagagcttacaggtttgtcttgagctgttgctggattgtaaactccgtgagagcaaagatcaggttgtcttgttcactttgttatctttggcgccgcacaatgcctggcacatagtgtgtttttcatacgtgtttattgaggagtaactgaatgaatgaattactacagagaaagacgtaagcattgctttaattggtctaaatatttcttatatcctagatagagatccagctgattttcttgtttttaagcctggaacatcgtatttatatttccctgccctgcctttctcccttggcacataaaatctggtcttcgcttttaattatcccactttggaaagtgcctcattattttgtctatcgccaaagtgggattttggtctgggtaggtaactcccaagtgtgtgcagctgcttgttaaccacaggtgagggatgaaactgaaccgcaaggcacattaattttttatatacacttaaaaatgctcactgttccacagagcaggcagccccccttcagaagccatattaaggtgacatgagctggcaccgtggcacatgcctatagtcccaggtgctccagaggctgaggtgggaggatcatcagagcccaggagtttgaagctgtagtgctctatgattgcccctgtgaatagctgctgtgcttcatccgtggcaatatagtgagaccctgtctctacaaaaacatgaaagggcatttataagaagtaaacgaaatatcttccagtatttaggcacattaaggagatggcataattaacaggttcatttagtttataacctaacgctttctattttcttcatggctttggtgtcaagaccgggtttctaaaaaataaatgagtgtttgatttttacacatttggagctctgaggaggaagcgagctagcttcgtatccccctctgagctcagcagcagctccaagtcctttcacagctgctattcccagtgtggcgtcagagctggtgtcccagctggggacacagagaaggaaacgtgtgtgagagcgtggtgcactgagccatggggagagagaagctggggaaggaaagtgaaatggaagaacaagcaggagagacaagggaatgaggaggtggtgtggagtgggtggttgagagaaaagttagattgtgctctttcttaaaaataatccttttgcctcctccactgtgcattttttttttctaagttagcagctgccatcctctgagggttgcccaaaaagtgggtgggaaggtggtcctggctgagataggctttggaaacacagcataccttcccagcctacatggttttggcctctgtgcctcccattttgttagtgtccagggatacttatgggggcatcacaggctactttgtgactgtagagatcctgaagatgtgtaagatggtaggaaacaaagctacaaacagaacatcgtgttcagcattttgatctgatgtgtaagatatttcttgacaagcatgaacatgcattcatgcttggaggtgctaactgcctctcacacacaggtcttgcccgttgtggaatcatagcgctaggtatgtccatacagacactcattcagtcttgtggtattcttttttagctttttggatgtgtaccagaactgatggatttatgctagtgaacattgttctgtgagcctgggacaatggatgctggttggtgatccagttatattcaggaaactgaaacagagaaatgggcagctgcttttgtttggtgcttccgggtaaatgaacagagtagcttttcataagagccaagaatatttggtgttgtgtcatttgacttccccttttcccagtgcacacccctcccaacctgacctcatacttcttggtacatttgtactttttcttgatttttaaaatgttttcaggcaagatccttaattttgataccataaaataaggtttctttaattttctacatgccattggtattctcaaaaatcgatctatatataggagaaaaggctttggaaatgtatgaaaatgaggtagacctgtcccagtttaaaaaacaaaacacaaacacaataaaactataccatctctttcatccccttctctatttttcaccttatataagtaggaggaagtactttgtctttaggtctgagtacaaaagctttttatattaaaaaatgttttaaaacttacagtttgccttttcagaagggacacttgtgttgtaattttgctggaaagggagcatatcagagtggttaagagtgcatatttgagccagattacttgagtttgaatcccagttcataccagcagtgtaaccttggttatttacttaacttctttgtgctctagtttcctcatatgtaaaaaggggatgatcgattttaatcatagtattctgaacatgaagtgagcactgcatgtagtcagcaataatggttagcagttattattttgagttactatgattgccttcttcaagcttatcttttcctatccatcatacacaggtaatgccaaaaacttgaggctaaaactctgtagagcttaattccttgtaaacaataaccactattctttaagctcttctggtcttttctgccacaaattctcactaggcgttcttttgctttagctgtcggcttggctcttggctcctaacggcatatttgagagaagcaacctaaattcagtctcttatcttgccagtgagtgtcagtctgcacgttggctggcaggtgagaggaccaagggaacaaggacttcaaggggcagaggtgctgtctcttgtgctgctcttttttgtggaatactgccaccagcaagtggcttggtgtaccaagggtgtccttgaatttagtcggcagttgtaattccccgttctggatgcctgaaatcaaatagactgttctgtcttttacaggaaggatctctttctggctctttctttgtgtttctttgtgaaattaatctggttaagaagggctgttgggtgggacaagtcagcaatttggaggcagtgttgtgcagaaaggaaaaatatttggcatacttgtgtttttgatggcaatgggttggctcaacaatgttgtgttttgtgtggtacaaataattgttgtttattcctctgtgatgctgatgaatacaagaggactgtgtcatagtgcttctgcttctttagccagttaactgcataagtctcttagagagccttgagtttctgaaatgcagctctcttgaagtcaccttgaagtgcccttcaaatggcagattttacactattcatttcttgttgccactggctattctattctaatagttattccatgttatcatgccatgagatgttatgagtagtgtgtttacacgtgtcatgggagagttgatgttgttgctatttatagtgacttatgagttcaggagacctcaaagggttctagtgtactccacgtgctggggtgctcagggctaaaaagagattgtgacttagggtggaaaatggggggaaaccagaatactgtgcagaatttcagtgtgaaatttactttagtgaagtaaatggggtataaatgactgtctgccacaggcattaccacctaagcggaaggcaggtcacatcctgtggtttgggattcaaatttacaaggcaggaagcttgaatgtgtatttgtgagtttgtgtgagtgtgtgtgatttgaatgcactgaaaaaaagaaaggtattggcaagggtcttcttgaaatagtattctgtttaggaattttttcatatagaaggaaataattcttaaagaacaagggttcttaataccagggatttaaattcagggctttatgagtgtgaactcataaatgcagaagtagttggggtgagggaccacgggcctactctataaataaattctgcggaattcttccatgaccacaatctggaggcaggaatgttaggctcttttaataactttcccatggataggagtcttacttgacttttcatcacttttatagaggtgttgcgagcaaggagtctccattttcctggttaatatagaatcaagatccaagttatcctttatccttctctgttgtttttcttccatagccagccatgcactgagcgctgttggtttttccttcaaagtttctcttatgtctgccacttcctttgaattcctaaggcaatacttcttatttggaatttcagcgttaagttcatccttgaaatagaagggagttatttcagacaaggctgccagacatctaaaatattagttctatagtctctccttaattaaataacaaacaaacaaacaatcctttttttttttctagcaaacagtatttattcccctttccccccgggtgtcatttctttgggaatagaaaaatgaccttgttttgtgtatctagccaacaattcttttttttttgttatactttaagttctagtgtacatgtgaacaacgtgtaggttagttacatatgtatacatttgccatgttggtgtgctgcacccattaactcatcatttaacattagctatatctcctaatgctatccctcccccctccccccactccacaacaggccccggtgtgtgatgttccccttcatgtgtccatgtgttctcgttgttcaattcccacctatgagtgagaacatgcggtgcaaacaaacaatccttctattgctcatcattacttaaagtaatgagtaaagcaacaatgtaacaaagtttcctctgctactttcaatattttatgtagtttaatgaaaattatagatgtactgtgtctcagcaaggccaccttaagttcatttttatgaactcataataacttccccagtttttgaactcttgcagcaagtattatctacatcacacaatctgatacttagatatgtaatgcttcaaatggtgacttacctctgtcattcagatgtatgtcatctcttcagtattatcattagagactcaaaggcagaggcaatattgcatgcttcttttgaatcatgttctgcaatagcatatttgttgagtggataggtaaataaaatgcccagaaattacccattaggttaaaataatctggtctatccaagaaaatttacaactatcttggttaagaaaatgctgtccctttaacctaaatccttactgaaaagtgattaaaatataaataaccaaagaactgtccactagagtgagttgaatcatggtgcaatgaaaagagagaataccaggaaaagtcttttttttatgctgtagttctacaatttgcaataactaatttgtacataattaaaatagaaattgtgcatgtttttaaaacagagatgaaagtgctacctgtgtatttttttttcttatgggaaatatattacaatattaaaatgcctgaaaacatgaaggtaagtgttggaatgcaaaatattataagacagcatttctttaaagaactgtatagctttctgagttggaataagcctgcctttgcttatgattatttatttagggttcatattccactgtgttgagtgaggatagagcataaaagaggttacttatggcagtgatatttgttaattactgaatgtgtcactgaggctgtttgcggagttttttttacatggagaactttaagagttggtactatatgtgtatctgggatagatatacagattaaggtccatgttgctttcagagatgaaataagatgactttagcacccttgtcaggattatgatttactgattctgaaacaagagcataactggaatgttctattcttttgctatttgccaattagcagaattctattatttaaaaaaacacattgcacatgatatccttactttagaaactactcctgatggtgatggtattgttattaaacactttgtatcaacattatcttttgtcatttatcaaaattttaccacaaagaccacaagataaaccaattatatttaactgattctacttcatttatgaggctttgtgtaggaataatttaagtgtaatggaaaatatgacttctggatgcaaatgtttaataaacatgtgggctgtctagctagctgtgttcgttcaaagctgaagctgttttcctcagaaaatagggcaatttctgttaccaaggtatggaaatagcagtttctataactagaaatttactgcagattcacccagtatccagaacacatgcatgagcaactataaaatcctaagtcaattatttgtctaattgtactttgttacttcttgtgacactgctgaatgccacaaacaacaacaaccaagcagatgggcaaaaacgcttcaaaaggattttagattattttttattgatgtccacacacagacacagctaatactcttccttggtcctctgattcctaaatataggttttgagcaaaagatacgctggttaagaaagactgaagataggtagctggcattccagtggccatttcagttagatcaaatgctaaccaaagttttcaaaaagtgtggcggaaagttttgtgagctattgtttgcatgctccaaccacacttggaaggtttatagattttttgctcttcgtgaaactgactttggaaatctgtctatgctatattttccttaaacctcttttatcctattattttatgattctttctgacattagtaaaaacatctaagcagttaatacaataggataaatttgaggatgttctttgtacatttttgtgtataggaagaagtggccaagatgctttcctcttctggcagatggagagaaggtgctgtctttagtgactgagtgcgagtggggaacctttgattttgtaaaaggctcatacaagttcagatgaaaaagaaatcaatcagggcaatgtataagaagaaaaaacaacctggagactatatttatttttaaataacaattgagttttaaaaatgtcattgatttctgtattttggccagtcacagggaatagagggggaagtgcagggataacactgaaagtaaaaggagagagaggagatgatttattctgagaaagaagcagaggaagtagaagaatgccatcaagaaagacaatgagattaaagaaaaatcactgggtgaatggcaagggctaacatcttacctcctcaaaatagagctctctataacttaataggaccagctctctacatccaatcctcaaaccggtttcaagtggcctctacctgccttatctttagtttcctagggatagttttttcaccatgattttcaaatgatcatagtgattctctaacgattttccctttattcttatgttatcattacctctttgtgttggttttagactcatctctaccagatgttcctcctataagaaacttgggccttgtcttatagttatgctagtccttttcctaatacctgatttttaaaattaccagcataccatatgataaatatctttagctttctaaaatttctttttaaacataccctagtcttctagcagattatttaatataactttcaattctataatttaaaaagtataaaattcagtttatactttttataggaggtgacctcaagtctttgttcagccacaagataaagctggactaaggtccagctttaacaaagatgctaccctgagcgtccacaccaaatccaaggctgtcctcttggtagtctgcctgatgacagaggaaattcagagtcaggcagtgggacttttttggaagacagctgggtctaggggaatttttgtaagcaatgaaccattctttaattgtgaaaccactggatgtggttagtagtttattttaaaaataccatatgttagttcattcctatatactgtgacaatcatagtttaatcaaaagttgcttgtgacatttctgttagtgttcataaaagagtggcttgcttccttgaaatcctgaactctgtgccaaatgccagcacattgacaattacagtttggcttttaggcaattgtgcagctttttgagtatgtggtaagtttttatttatttttgtcactttcactaatttgtcatcttcttaaatggaaaaatattttctcagcactttgtttggtaagtagggacttttactcttttctccatggttccccgagaggaaataagctaatgtaactgcttttcgactcttttttttctggccagaaagccaaatgaatgcatgatctcattgagatacgatctatttgtatgaactgtaagcttgtaagcttgtcatcatccttcatggtcctggggcaggcgcctggctagccactgtaacaggatgaggaaagagatacagcaagatccctgagacttcaattcagtgcagtgcaagtcaattcatttcaattcagctcactttaatccaatctaagaaatatttatggagtactttttaggcatagtcctgggcactggggctatagaaatgaaaatttcatgaaaactgacattttggtgggggaaataacacaaatcagataaatttaagagaatgtggtaattactaactacatcagtatcagtatcaggaaggatgagatgcctcattcatccatccatttcttcatcaaaaatatttattgaaggtctacaccatgtaccaagtactgtgctagatgttggggtgatgatagtgaacaaaattaaagactttctacccttggggagcttgtagtcagtttggagagacactaactaatcaaatacccatacaaaaaaatgttaagttctacctttggtatgtactgttggagtgtggcccatggtgctgtgagatttgataaaaggtaggttctgatcaaggtagggaggttaggaaaggcttctctgagaaagttatgcttgagttgagatctgaaggatgagaaaaaaaaattttggtgaaggctgtaagtgaaaaaaatactgcaggtcacaagaagagcacaaaacaaggctctgggccaggagaaagcatgatgagtacaagagtggttatctaaggcaggccatcaacactgaccaagtatgtgaggcctcattgaggagagttccatctaaaaaataatttcattatctttgactaatatttgaggaaatggccaaggtgggtggatcacccgaggtcaaagtttgagaccagcctggccaacttggtgaaaccccatctctactaaaaatatgaaaattagctgggtgtggcagtgtgtgcctgtagtcctagctactcaggaggctgaggtacgagaattgtttgaacctgtgaggcagaggttgcagtgagccgagatcatggcactgcactccagcctggatgacagagtgagagtctgccaaaaaaaaaaaaaaaaaaaaaaaaaaagaaaacgaaacgtaccaatttcagatgaataattatgtgtattaaatgccatgataaaagcacatctatatataaggcatacagtaagttgaagtactgatttttaacctgagtttaaatggagctttatggttatgattctgtgttttttctcaacattgtttatctgcagaaccactcccaacttctgcttacatcttataaccttttctgcaaatatttattcctatgatatcagtgtgccaaataaagtagtgttttttttttttttttttttttgccactagtgaatctcagcaaaagcttttggcattgacacgtgaggtgcattcttatcttctcaagtggctctatgattttgtctattttcatgtactactccactggcagccaagataatcccttaaggataccaattctacaattttagaagtatagaaggttggaggggcaattcattctgggtgaatatttcagtaacattggctgtaaatcatacccaggccttttctttctgtgactcacgtgatgtaaggaagagatcagatgacgaggtcaagaggacacaaaacctcagccctgcttctgctccctcaatgtcgtccatccaaaatgactttacatatgtcaccagagcatggaagtgtttatggcgatttatactttggttttggtttgttagcttattttgtcatagttaggacaagaggagacatttctgatgcaaagggagattttctttagccagaggaattttgaaacctttattactaagtacaacagagtatttttgttcattgtacttttgaagtctgtgatcaggaaatgtattttctttaaaaataaatcagaaaaggtctcaggagggcctcaatgactgtaataaaatgtttctcagagcactttttatgttttcacactttgcttttttctcctttgctgcaagttgcagttttccatcaaagttattttggatggtgttgaaagttttctctgggtctttgtgcatagttcagagggcattcagggaactgactaagccgcgttaactatatgttgcaaaatgttttatttttgtgtagtgctgtataacatatagaagctttcatacacagaaccctaactgttccatagcccttgatgcaatcagaacaaacattattcctgttttagaaatgcaaatcagaggttcccacaggctaaacaatttgcctggggtcacacatgctgtgttgggagtcagaattagaacaaggtctttggacttctggtctgaccctctatactaactatatggtgaagctgacatagtggagttgttgggctaaaaatgaggagcctttgatagggtgcagtcaaatcttggaggattccattattcatttctccaaagctgggtatattcaaaattagaaaattacagctatgaatagttgttttccacttgattggtctaaagtcaactgaattctagagaaaactcctttgaaagtgtgttgccttggaaatggatgatcgtagcagtataatagcttttaccgtatttgaaattccagcagtttaggtgacagttgtgtctttctgaagggtgtgggcagattctgaacgggcttttcccgttgctcatcagcttggccatggctgctcttattacagcagtcactcattttcacagatgtctttaaaaatttttttttgtttttcttttctgagttcagaacatgtagaagtaacttctttttggcatattgcattgcgtgtctttgcctagcaagtagttggtgttaggaaatgtgcatggacttaagtgggaacacataacatttgtcatgtactatagacttaataaaggctgtcatgtccatgattatgtttaatcctcgtaagaaccttgtgagaaatataatgccagtgttatttttcccatattttacaaatgaagaaagcaaaatttgttaaaaaactattatacagtggttaagaccataggtttggaatcgtagtttgtgtttagatcccagtatactttacttacgagctttttgatggtgggcaagtaatttgactgctctaagtctccattctcgtgatctgtgaggtaagatgataaagaaatatacctcaccaggtggctgtgaaggttacctgagtataaagctttcaaagggcactggcaaataatacagcttagtgtatattagttattatcattaagtaacttaatcacattcacacattagcaaggagaagagctgggacttgaacctatgacctttggttgtttttgagatgaagtctcgctcttgtcccccaggcaagagtgcaatggcgcaatctcggctcactgcaacctctgcctcctgggttcaagcgattctcttgcctcagcctcccgagtaactgggattacaggcacctgccaccatgcctggctaatttttttgtatttttagtaggggcggggtttcaccatgttggccaggctggtctcgaactcctgacctcaggtgatccgcccgcctcggcctcccaaagtgctgggattacaggcatgagccaccgtgcccggcagaacctgtgacttttaactccagcttctaccttgttatttttccaaaatactaggaatttccttctttctcttctctatggcaagtggctgctacattaagttgttagtgaaggggatgggttttggaataaaagacttggggattctgtgagaacatttgacctcctggaataaatcagcaaattacttaaaaatgtagaaacacactccttattattaagagctacttggttctaacccaaactgaacttaaaaacatcccctactctgactcacattattagtatatgaatacttttggatgtaccagttatgtgatgtatccactgtccttagtaggggattaaggatagatgttgggttcccacattataagcccccttgctcccctcaacctttccttgcatggacctggtgagagtgaggggtggagctcataggctcattggggaacaaaccatggtctcatctgcactgtcttctaagcaaatcagttagattaaaagcaaaagaacaaattagcttgagatacttactgaatttggattgccccttgaagtgtttacatttatttccatcctgcctcttctcttccagggatccctgctatagctttttggacagcctaggtaagcatggtggctgctgtgggtgcccaccactacacatctttcacgtttgcctgcaggggtcctcagtgctgcaccatagattatgtctatgtggacaccttcacttgtttaaatgttcacttctctgattataaaaataataatacctgacctttacatagtgcttgacaggttacaaagcatacttgtatacataaatgattctgagggatatttagaggttattatttctgctttacatgagaaaatatagatctgaaaggtgaaatgaattacctccagagaggggacaagtatgagaagtagttaggacttgaacattccaaatctggtgctctttttacagtacctacagtgatatcttctcccagaaatgaattaatgtgttggctagttaatagcttctcacattctacaaaagatttgaggggtcttgaaataataaaatatgggtggaaatagaaaccaaaccagggagaacacacaatatccagaaccactaggattaatattgttcctacagttgaatttaatttgtctttgagcttcctggcagccaagataaaaagaggcacaatcagttacatatttcttattagaaaaggaaaaacatgctacagagaagtggagattttactaggattgtattcaaaataattgttttgcttgaggccatagataaggagcaataagaataaatgaagataatgctctcaacaaaaatttgtagctactcaataacataaaaatgcattgcaagggggctaacatttgctgggtgcctattatgtgtctggcactctactagtgcatattttattttattctgcatattttattttatttaaccctcatgaacatttaatgatcacaactatcttttaaaggtatcattgtgaccatttaatgataaggaaactcatcctcaaataatttaaactatttcttcaaggtcacgtagctagtaaggagtaagccagcaattgagatccagaccttgtctgattctacagcctgtgtcctcaccattctattcatgctgcctataatgtgttagagacataaattaactaaatgcaagtatatataatcttctagtgtttctactttatccaaggatatgttttacaggacccagattataggttggtcttctgtaaacatcatttctctcatctaggcttcagtaggaggtgagttgtagaaaagctcatgtagtggtgctgcttgagagtgtttccccagagtgttaactgtggctatgtgttgttgttattgaatattaagcactttatacactaccttctttagtcttcccagaagcccaataaggaaggtacttatttccattttgtagataaggaaagtgaggctcatggaggttaaatgactgaaagacatacaggttctcagtggcgggattcagacacagatcttcctggctctaattagcatgtgctttaccattgtactagagggcgtcatgttaagcaagtggtaaagttgttaatctcttgaaaaaatggatctggactcttgtttggaagaaagaccatcttgcctcagcactgagatgactgcaggaggacctagagacaagtttgaattttcctaaaaaggcagttgggtcagcctcggcatgtggtcgagctttatgtgcacagttccacatcataacgcatgaaggatatgactttgacatgaaaagtgttcaaagatgctgttcctgatgatttttcacaactacaagaaaaccttaaaaatatttcagtggattttattttatggggtctctgaggaacctactaaggtgaattaagtactagatatagcaatgtcacaaattgatttgaacaaatttaattttgggaaatgcagccaaaataataattttagtttagaatggttaatttagaatggttctttttgacagtcattaaataccagaataaattatgtgaaagatgtcactccaattttgtgattgttctcataataataactgccacgtctaccatcactacaataagaataggtaatgctcactgagttttgttctgaatgcttgataagaaatagcttagttaagcctcataacaaccctatgaggtagatataattattaactccattttatagatgaaatgtagagaagtgagtaatgcacccaagggcattcagcaggtaaatggctggctcactgcactagtctgtctctacatatatagtggatcagataaagatatacatgcccctcttcttcactgtgggggagcatgaaaccagttcatatgcaagtacttttaaatcattaaaagcagaacttaaaaataattggggcaggaattcagaagaagcataatattgcttgcttagttatgaggagaccattcccgaccaccctaattcttgcagtgggagaaatgtaaaaagactggatgtctctattgagctcctgtagtttggttcatagttggtttcagtccccagggccaaaagctagttaaagtttggaaaaggtcagtctcatgacattgttcttgatacgtttcctcacaaggtaatgcatagtgtttgtattactgatagtagggtggttttgggtaaagccgacttgctccttaaactgaatattagactgaggattctagaattcttttttttttttttttacaaaacaaaaaattggcataaagttttgaaagcatagataagtagttgagaagtagctctgagaagcatatgtgtcaagcgttgcatgctggaatcagattgacctggttcagatgcatgcccttgaaccagttaactaacttctttaagtctcagtttctttatctgaaaaatggtggtaatactgtctgactcatggaactgttgtgatgattaaatgagataatcaatataaagtgcttagcctaatgactgacatataaacttaaagtaaatacagttgaaacttgaacaacatgggagttaggggcactgacctaacaccgtcaaatctgtgtgtaactgttgactcctcagaacttaactactaatagcctactgttgaccaatagcataaacagttaatgaacacattttatatgtgtattatatactgtattcatataataaagttagagaaaataaaatgttattaaaatgtcattaagagaatcgtaatgaagaaagaatatatttactactgattaagtggaagtggatcatcacaaaggttttcactgtcgtcatcttgacattgagtaggctgaggaggaggaagaagaagagcggatggtcttgctgtctcaggggtgacagaggaagaagaaaatttgcatgtaagtggacccatgcagttcaaacctgtgttgttcagtggccaactgtatgtgccatatgagatttcccattaaaaatggtataaactaggtactgagttcattcagatagaattaaacatgaagaaataaaacaaatagtttgacaagcagtgggggtcactaaacacaacattcctaagtaattcagttgtcagaagtgcagttcccaaatgcagttagtatctttagaggagttagaagttctgattatcaggctctgtagaattttttttcatcctgagagagatgagggtgatcccatgatagagcagagaaaacactcaagaggtggagttctagcctagctgtgccttttactagctctttgacttttggacacttcgtttaatgtttggggcttcaagttactgagcagtggaatgaagagtcagtgtggataatctctacatttcctaccagctctcatattcttttattctaaattagtttaggtcataaaaaactagataaattagtcagtgaaaaaagttgccagaccttctccaaatagtctcaaacaaaacagagaggaaataaatgcaaaataaaacaaaaactcaaaagtagtttgctgaagattctgtttttttttctaaaatgtccatttgaggccaaatgaccccttcttgtctttcattgattcctttggagaaatgtcctcagctcattcataggcctaggatgttttgcttccttccttgattgaaaaagtttctttaaaaaattctttcactgccacagcaggagtgaacccaaaggactcaggcacaggaaatgtctttgctttaattgttgccagtgccagtacagcccttttccaagttgccctgagctgtcagcagagtgaaactatgaatgaatcaaatgaatagggaagataagtctaaatagcagaacacatttttttttccctccaaaagaacaactttgtcttgagcaaaggatcatttaaactgaagatgcagttggcatggtgccttggaaaggcttgtcactttctttctacaatacttcctgaaaagttttcctttcatttgagacttgttcaaactggttatcataatttaccttaaaatattggtgacagggggtgatggttaaacgtaggatagattctataactggttctttgcctttcaaggtttcaaggtagtaaggttttcctcagaaaaggagctcttttttctttgatagtactttgagaatagtagtatcttttagcaggcagacacatcacaaattacctatttaaacctccacatttaacaggtgaggcaactgaggacaagtgatttggccaaggtggcacaaacagttaacttaggccttcggccctcaagcaaatgttttcagtaccacaccacatttccttcctatattgggctgcggcttcctagttcttacataataactcaaacttactgcatcagtaaccatttcccaccaacattagaactttagaagagtagaaagatttttccatctttctgaaggcatgcttctaaatgaagttgaagctggtgatttacctctgttaaatccacgagatgtggctgccaggctctcctgaaacgaatgaacatgagaataacaaagtgtaaacattcatgactgaactgcagtttccaagacaattagcaagccagatccaagtgcagattgaggacccaaagaaggggagacagtatggcagtcattctggagtaatcctgcagcactacaaactggcataatacagcctttttaattttgagaaactttttattttaaaaagattatagatttgtaggaagttgtgagagatagtacagaaaggtctcatgtatccttcagtccatttccccaatggttatatcttatataattagagtgtaatatcaaaaccaggaaactgacattggtacgatgtgtgacatcgtatgatgtgtgacattggtgcgatgtagttacatataattttgtcatgtatacattcatgtaactactaccacaatcaagacacagaagagctccatcactacagagatcttcgttgggctatctctttatagttacaccccctcctttcacaccatccctatccctggcaactaccaatctgttttccatctttgtaattttgtcatttcatgaatgctatataaatgaaatcatatggtatgtgaatctgctttttttttttttagatcttcttctttttttttcccactagcatagtgcccttagttccatctaagttgttgcaaatcgttcattatttttgttgctgagcagtattctgtggtatggatgcaccacagtttgtttaaccgtttacatattaagaggcatcttggttgtttctggttccaggcttttgaaataaagctgctggccaggtgtggtggctcacgcttgtagtcccagcactttgagaggtggaggtaggtggatcccttgagcccaggagttcgagaccagcctgggcaatatggcaaaaccttgtctctacaaaaaagacaagaataagccaggtgtggtggtgcacacctgtggtcccagctacttgggaggctgaggtgggacacttgagcccaggaggtcgagtctgtagtgagccaagattgtgccactgcactccagcctgggtaacagaatgagaccctgtctcaaacaaaaaacaaaaaacaaaacaaaacaaccccaaaacaaataaagctgctatgaacaattgtgcacacgcttttgaatggacattagttttcatttctctgggataagtgcccagtagtacaattgcttggtcgtgtggtgaatgggtgttttatttttaaagaaactaccaaactgtttttcagagtgcttgtatcattttgctttctactgacagtgtatgagtgatctgatttctctctactctcaccagcatttagaattatcattatttttttattttagctgttctgatagttgtatagtgataatcttgtagtcctaacttgcatctatttccctaatggctagtggtgttgagtatcttttttgccatctgtgtatcctctttggtgaaatgtctctttatatcttgtgcccatttcctactggcttggcttcccttcccttcccttccttttccttcccttttccttccttccttccttctctttttctttctttctctttctctttttctttccttccttccttccttccttctttctttctctctctctccttccttccttccttccttcctctctctctcattcacttctctctccttctttctctgtttttctttctctttttctctcgctctgtctttttctgttgagttttcagagttctgtatatattgtaaatatgaattctttgttagatatgtgatttgcaaatattttctgccagcctgtagcttgtcttttttctgcttcattgaggtatagttaacaaataaaactatataaatttaaggtgtacaatgtaatgattttatatacatatatgttgataaaggattactgcaatcaagttacttaacacagctaccacctcacctagttactgttgttttcttcagtgagaacatttaagacctacttgtagcaaatttcaagcataccgtatgatattgttaactatagtcaccatactttatgttacatcccagaatttattcatcttataactgaaagtttgtatccttggaccaacatctccccattctcccaacctcccagcccctggtaactgcccttttactctccgtttctatgggtttgactttttttttttaattacacataaaagtgagttatacagtctttgtctttctctttcttacttatttcacttagcacaacgtcctcaaagtttattcatgttgtcactagtagcaggattttcttcttttttatgtctgaataatattccattgtatatatatcacagtctatccattcatctctggatggacactttggtcatttcgtgtcttagatattgtgaataatgctgtggtgaatatgtgagtgccaatatccctttgagaaactgatttagtttcttttggatgtatcccagtagcccagaagtgggattgctggatcctatggtacttctgttttaaattctttgaggacattccatactgttttccataatggctgtaccagtttacatttctgccaccaatgtctaagggttccctttgcttcatatcaacacccacctcttgtctttttcataatagttatcctaacaggtatgatgtgacagatgtcttattgtggttttaatttgcatttccctgatgattagtgatgctgaagtcttttcttgtacctattggtcatttatttatatgtcttctttgggaaaatgtctaattaggtcctttgtccatttaaaaaatgagattgtcattattattattgttattactatttttgctgttgagttgtatgagttcctaatatgttttggacattaatcccttatcagatatatggcttgaaaatattttctcccattccataggttgcttttcatttttttccagctttattgaggtataattgacaaataaaagctgtacaaatttatggtatacagtgtgatattttgattaatgtatataccgtgaaataattaccataatcaagctaatttacatattcatcactcatgtagttatcattttttgtgtgatgagaacacttaagatctattcttttaggaattttcaagtatacaataaattattattaactatagtcaccttgctgtacgatagatctccagaacttactcatcctgtctaattgaaattttgtaccctttgagcaacacctcccattcttcccacccatcccaccagcccttggcagctgccattctgctctctgcctctgttgagtatgacatttttttttctttaagattccacatataagtgagatcaaggaatatttgtctttgtgcctggcttattccactaaacataatatcctccatgttcatctgtgttgtcgcaaatgacaggatttcctgtttttcaaaggctgaataatattccattggatattatatatctatgtatgtatatatacatatatccgtatatgtatgtattatatattttatccatttatacttgtgttgattccatatgttggctattggtgaataatgttgcattgaatatgtgagtgcagatattaatatttccttaagatagtaattttgtttcctttggatgtatacccagaaatgggatttcttgatcacatggtagttctacagctgattttttgaggaacttccattctgtgttctataatggctgtctaatttatattcctattaacagtgtatgaggattctcttttctccacatccttgccagtgcttgttatttttttttatttatttatttttttgagatggaatcttgctctgttgcccaggctggagcgcagtggcatgatcttggctcactgcaacctctgcttcccgggttcaagagattctcctgcctcagcctccccagtagctgggattacaggcacctgccatcatgcccggctaatttttgtatttttgtagggatgggatttcaccatgttgggcaggctgtcttgaacccctcacctcaggtgatctgcccaccttggcctcccaaagtgctgggatcacaggtgtgagccaccctgcccggccaatcttttgtcttttggtaataaccattctaacaggtgtgaggtaatgtcttatattgcatttccctgatgtttagtgatgttgaacattttcagatatctgttggttatttgtatgtcttcttttgagaaatatctattcaagttctttgaccattttttctttggctattgagttgcatgaattccttatatattttagttcttaaccccgtattagatatatggtttatgaatattttctttcatttcataggttgcttattttgctaattgtttcctttgctgtgcaaaaacttttcagtttgttgtagtcccatgtatttatttttgcttttgttgcttgtgcttttggtattatagccaaaaagttattgccaagattaatatcatggagtttttgttttcatctaggagttttatggtttcagggcttagatttgtctttaaactatttcaagttaatcttgtgagtggtataaaataggggtccaatttcattctttttcccagcctgtagcttatctgtacattctcttaaagtgtctttcacagagcagaagttttaagttttggtgaagtctagtttattgatttttttcttttatggatcatactttttgtgtcatgtctcaaaaccctttactaagacctagtcctgaagatttttttctctgttatcttttaaaagattttttagttttacatttaactctataatctctttcaagttaatttttgtattaggtgtgaggtttaggtcaaggtttatttttaacatttatttttcacctaaatatgaaaatatctatatgaaagtgcacaagtaataagttctcataaagttattatgttgcccacttttttttagataatgtctgctacaggaagtggtcactgcaaagaaataaaaaggagagaattaatatatatttgatactttttttgagcagctgaatctttacataagtgagagttaggagatttcaggcagagcaggtatccaagaggtagctctctcaccccaaattttgtttcctgacttgcgtttgcatgctgtgtacttaactttgagttagacaatggatgctcatcacaaagcagatgctagacgttgtgtttagcactgaatatcctgcagtgggcctggagtcacattcaacgctctgcttaagggctgcaaattggggtctgagtccaactttgtatttaatacaatgctgaacaatgattaggcaacaagagtacgtttggttttgacggaaagcataataatataaaagaacactaggatatatgtcaggaggcctgggatctaatgccacatgtgcattaagtgagtttatgtctttctgcaacttgggaaactagtatgagccccggttttctcctgtgtaaaaacaaggggccttgaccctaggcagtctctgaaatctcttctaggtttaaattacatggttctaagaaatttttaaaataaaatggactctggtttgatcttcattttctcttgctaattagaatataaaaccttgatatgagaagtgataattgaagtttaatattgcatttaagtgtaacgtgttagggaaattctccctttggaatacataacacaacatgtattatattaagtgtttaaatatttctaatgctacagtgggttattggcagattcttcctccttcaaaataatttgagagattataatgccacactaaatatagtgatacgttagtattgccaatgaaatgtgaactgtggatttgtcttgaacaatacgtagcactggtgactgaggcaagggtcatttgatctcttttttctctttcttttttttttttttggtttccctttaattttctgaatgagatgactatatgatacaagttatttctttcttacatttatttgggtgacctcagtttttgttcatgcatacaagttctgaaaaagaacatttacttctttttagtgaaccctgttaaaaaaaaccttgagaagtttggcttgagatttgagcagaaaataaattaaaaaatgatctgagttcttaggaaagaaaaagtagccatggctttggtaaaattaaaagtaggccctgtgaaaagccagaaaataattcatttggccattgcagtatagtttatggcaagtggacaggcaactaactgagttaggaaaaagggcatccctaaagatgattttttttttttttgagatggagttttgctcttgttgcccaggctggagtgcaatctcagctcactgcaacctctgcctcctgggttcaagtgatacttctgcttcagcctcctgagtagctgggattacaggcatgctccaccatgcccggctaattttgtatttttagtagagatggggtttctccgtgttggtcaggctggtcacgaacacctgatatcaggtgatccgcccacctcggcctcccaaagtgctgggattacaggcatgagccacggcacccagctgatttttttttttttaaagacaaggtctcactctattgtctaggctggagtacagtggcatgatcagggctcactgtagcttcaacctcctgtgctgaagagatccttccatctcagcctcctgagtagctgggaccacaggtgtgtgccaccacatctggctgatttttttttttgagacagtgtctcactatgttgcccaggctggtctcaaacttctgggctcaagcgatcctcctacccgggcctcccaaagtgctgagattacaggaataaactcccatgcttgctcagattttttaattagaccaaaaaccctgggaatctgtactaatgagtgggacatctgtgactggtgactggatttttccgcaacgataaagggactattacattgagagctgaggtctgaaaatgctgaatagacttggttagtaaatttgatgagtgaaattttattatgaaaatacctgccaagtgttctgtcatgcatttccaaaaaggtatgctactcttcatcttttatgatcacccaaaactgtgatcagtgtagcaacaatgaccagaattctgctgatttgttttatattttggaacatcattgaaaccttcattccgctatctccctcctcccatgatcctcatttctctttcattgccttttgaagcatttgaatgaaaagctgaattccatctttgtgtgctctttcatggcaatgtttttaggagtaggaggagaatctaggtacagagtgtctgcaatagctgagatgtgggcattcctgacatttgacccacggggagcttctctttcttgttgtcagagtcacacagggttgcactaggtttgcctcagttgctttgaatatcttgatttttgtgggtgggaagccaacagaatcttggcaggatagggtgtgaaggccactcttctctaatatgtgccaggtccatagcctcgttaccccagtttccagagaagaaaatgttaggctgtcaggggagtggtttttgagtcaacattatttctatatctccactttctttccttaagagtaattgcactagatcatcagattgtatccattaagcatgtattgctatttacagaaatgggagaccaaatcagattgtgtatgaaactttgattacttttcctctacaacatttccgctggttttgcatgtgttccagagcctagggaacttccctgcagagttcaatgtaagctgatcccaggctggtccatggtgtcatcctttcagacccaagtgcttgatgagctttttatagtcctcctgctgcagatgcctcctccttttgcttccttatgctaaatgaggagagtgaacaatcatcttacaattttctcagcagtcagctttcaggaataaagtcatttttccccctttgtcttgacttctaaagtctaaacttctatgggaaacaacccacggtgataagggtagtaagagtaatgctaggagtagtatgatgtcataggtaaaaattagcctctatcagttatatttcccagaatggaaataaatggcttctacttgtaatttagactgggatcattttagattttatactctttgccagattcattactactcctttaatggtagaaagacttggtttctacttaaaatgtttttcattgaatttgagtataaaaggagtttaaagtccagctaatctctctgtcaccaaaacagaatccttgctgtgatttttctgactgatcataattcacactcccagggccagagagccagttgctttgcatggtggtccgttccatgtgtggatggttttatttgctaaaatgcctttcattacattgactcagagttagccttcctgagattttgaccctttggtcttagttttgctcttcataatgcagttaatccttcttccacataacatcccttgaaaattagaataaattgtaacatctcttagctttgggtgatgtgatgtttttataagctatattctatttatttatcttccttcaagtcattgctaataatgttagataaaacagtatattacttcttcaaggtgatcttggcttaccagtcaactctgtttttacatctttttggctgtttgcatttaaacaaggatgatgaactcacctgtgcaccttggtcttgtaatcattttgctccgcattcttttcttttatatatctgtattcttacattttgggttctgctgattattttgagctttatgttgtcccctggttacctctggtttcctgatgttccctgacttagacactttgggtaactacgtgcccacctacttctctaacagactggtgccctcaatggggaatctgattaggccgttatttagtcatggagtaatattccttagagtgagctttccaactggtgtcctgtagcagtagattacagatgtgctgagaaattgatctctgcagctcttgaagagctgggcagagtctcagtagtctcaggtgtcaggtgcctcagtgtgacattcagatgccattatgtgctccatggtgaccaaagccttaagcactgcatcaaggaatcaacatagagcactggtaagttagtagggcatagggttagatatttgcttaactcaagataaatgatgccgtcatttagtcaaaaaaggaaataaggctttcttggcataacaagttctttgtgaacctatcctgactctcggtaacctcttaggttgaaagaggtgatggtgtgagtgagatgggtgctgtcagtggtgctctgtgtggcgattacccccactggctcacctggggagactgagggcaaattgcctgtattgatcacagtcctctcattcagtgtctgtagcctcaaaaagatgggtggtagtatttcagtcaagtttactgggggctggggcttgatgaagcatcagaacctggaagtatgctgatgtttaacccctgcttatcttgcaggcacaggcaagtgggcaagtgttaggaaaagtgaagtcaacatctggagcactgagaaacctgactgtacaataataaccagctataaaacaattctcagaaaacaattctcatattactctatgagatgtcattgaaaagatgcatttaaaggagaaattaaatattttttttgaactttggctactctatttcaaagtttgtatttagattaaaatgtcatctaatctgtttggtactcttttgttttctagtgaacaatttttgtgtagtgacaagtgttagctatgtttattatgacttttcataacaaaactttgaagcaggaattctcaaatttaaatgagcattggaatcactaggaggtcttgttaaaagttcagatttctggccaggcgcagtggttcacacctgtaatcccagcactttgggaggccgaggtgggtggatcacgaggtcagaagatcgagaccgttctggctaacacagtgaaaccccgtctctactaaaaaaatacaaaaaattagacaggcatggtggcgggcgcctatagtcccagctaccagggaggctgaggcaggagaacggcgtgaacctgggaggtggagctttcagtgagctgagatcgcgccactgcactccatcctgggtgacagagcgagactccatctcaaaaaaaaagttcagatttctgggcttcactctcaaagattttgcataagtaaattggggtggagcctggaagtgttttctaaaagcactccatgtggattcagttggaagtcaacagaagaccaaacgcttaaaagcactggatgtaaaggaccatatgcttttgtactgatcagctggtggatacttagttttgtattgtcaaagggccatttgctttggagacttaggattcttccctagcatgtgtctcttcttgggctgtgttgaaatacagaaacaaccaaccaaatggaattatcacaagcagttttctataactttgtgcaaagttaggccaaacattacatgttgttatggattatgaaattcagaaaacactgcctcctatttgtgtatagctataccattaaacagtattttcacttagtttgtctctgttgatctttataacaatcttgtgtggttagtatttttatttccagtttatgaatgagaaactttaaggttacaagtaaatggtagaagtgttactctaacctttattgttactacttcgaaattaggcaggttttattatgtgccaggcactatgttgtacattctgaaattcattctctctctgaatctttataaaacactgtgaggtaaatgttattattatttttagaattattatgagttttttttttttaacttggctcttgatgaggctaagtaacagtaacttcttgaggtcatgcctttagtcaatggcagagccaagactttagccaggtttgtctgacactggagttcatgctttcactctgggtattgttaaggcagattgcctggcctgattatagtcttctaattagatgtctgtgtcctaagaaggatgagtggtagtgtttctaggcaagttaccagtacacattatacattatagcaggctgccagtatacattatataaagccatgctatacaactcattctagaaagaacagaaagcaacagggagatctaataggaaggaaagcagacattcaaagtataaaaattaaaatgaaatgaaatacaattgtgcatttttagaaaacttgataaaaataggatttcacacgcttcagaagtacaaagagtgggaaaggcataagttgtgatctgcatacattctgataatgttagccattcttcttgaagaagcagtaggattggcctgtgttttataggcttttgagtgttgtttggtgtttcgtttatgggcttatttttccattactaataccagctggcatttgacctttcatgctcatgcctttggcagtatagtctttctaacttcaatgtacagtatggcctttgtgttttaaatcagaaatttattttaatcaaatacatcttgtagtgttgtgctagtgcttttccctcattgacagtaaagtctcattgatgctgtatttactctggatttctttatgcaatttcaaaatgaaaaattttgattctggtggttctggttgtagtccagtgattagtctcaacacaaaagaaataacaaaatgttaattcattttcccctgaagctgactctggactagaagtcaaaacaaaatattttctattaactaatttcatgagaattcaatatgaataaatgacttggcagtatctttttttttaatcccaagttaagcttttctcatgactttatatcatctactactgatggtgatgaaaattcccaggagttaatatgttaccttatcctgatatctttcaattgacatcttgaatgatcagaatgatctttcaatcatttttaaatctctatccactgagatgcatttatcagctgtccatattcatttagcttctaatacttaccaattgcattttaatatcacttgtttctggtagtctaggggaggctgtgtcagaaaggggtagcatgcagaatggcctttcacctaaatggattctatcttgcatggtgacttacttgaaagccatgagtgacggatctgggatatataagtttaggcctatattttgtaagtgattttctttcagagagattccctgaaaatgtcagagcacctgctttttgatagagacagtctatgcagcacttgatggtctagcctgaaatcaaggagtcagagaacaaatatagggtaggggattttttttttttacagagtttcacactgccgcccagcctggagtgcagtggcgtgatctcggctcactgcaacctccacctcctgggttcaaacgattctcctgcctcagcctccctagtagctgggattacaggtgtgtgccaccatgcctgcctaatttttgtgtttttagtagagacgaggtttcaccatgttggccaggctggtcttgtactcctgacctcaggtgatccaccccccttggcctcccatagtgctgagattacaggcatgaaccactgtgcctggcctagggtagggtctttagaagggctttgaagggtgttgtgagccatcaggccagtatcctcatttgagacattttgtgtagttcagctatttattcagttaaaaaaatctccatggaaatgatatgtagaagtctgtggtatttctctcattccatcttatgagttaaaaaaatcaatcctaattctaattttttcttttttttgtatgattggaatcaaaatatgcataacctttgtatctttcagcagaatacaggctggttcttgactttttggtgggctgctggaattacattctaggttctcagactttagggacttaagctgaggcctgggctgaccttgggaatgtgctttgttatacctctgggagtagcactgagcaaagcaggttgggagccaggattccagtacaggcaggaaggagtaaataattaggttagataagaaattatttgccttcctttcagcaggtggacaagctaacaaggaaaacataataaaggaaataaagctcacttaaagagggaaaaggccaataatggaatcacttaaaactttttattgaagaaaatgggattcccttgcactcttgtttgaaatgtgttttggatatgcattgttttatatcagatttggatatagaattatgacattgtccagccataacaactactttgttaattacaactagttagtggatacctgctggtactgcactgtaagtagtaccaacatattctaaatgttcttatataagaactaaaatgttattatgcaagagaaattccctgcttccaaggagttttataatctagcagagagagaacgtgtacatccaacacaagttgagaacacttgcaaagtaacatatcaataagtggaaaaaaaacagtgcaaatggaagtattgagtgattaagagagtgatgccaaagatatggggctggctgaggaaggatctgaattttgaattgggtaacgaaggaggagagaaacaaattggcagacagagatgaggaagaaagatatatgtgaggccataggtttggaagtgaagcaagtcacatttgacatgttagtgacaataagcaagacaacaagcacacaggctaggacaaggcggaacttccatggccgtggataatttgggatgaatttgattattgatttgattcaagggaacagtaggaaaatgccatcgattcttgagtatatgcaatgtgctgaaaatgacagatactggtaattatttaggcagcaacatctatgataggttggagtagtggagctaagggtggagaaagtattagggagctgttttgtaacctagatttaaagtaacgaaggtttagaggagggctttgggaaagtctgctgggttaggaaaaaaaatgagctcagtttttgagatactacttttcagatgtagcaatcatatcctgagatgaccggtcagttactagacaggattacagtttgagagctcaagtcttggccatcgactttggaggcatttgtgcaaggtgatagttcagtaatgcatgtggagtatgtatcatggtggtgactattgagggagaaatgcagaaagctgagtttggaaccttagaagcagctgccagccaagggggtggaggcaggcaaaaagtatagtcagcaaatgagacaaagaggtagtagaagaacacagagaacacccagggaaaccatgcgaggagagaatttcaacagtgctaactgaagcatagaggtcaaggggattgaagacttgagaaagacctattcgacttctcaagggaaaggtctttggagacttagaaaaatttgtttccagtgaagtttcagtgcaaaagtgcatcagggattttctagatactctgcatgacaaggggattaatgtttaataaataaatcccttctgtaattgctttagcacatatgactgggtatctgggttttcaatatttcaagggaaatggtgaggtcactgcagaaaggaattgaggttagatttctcatattatacaaacccatcaggtgatttttatattatgtgggagagaaactctcagagctaaactattgggcctatttagattcacaagatcctagtggctctgggaaaaatctttgggaaaatgtaaaacctgagcagtgttagaaagcctcttctttggtcctgttatttggtttatgttaatgaattagcttggagtatttgtcagagatgttgagttgtggaaaataataaaaatcagattcaaatttaccaaaataattaatatcaatttacatggaagtggaggcaccaaagaattttggtcaagacagaatcaaagctccaaatttaatgacctacagttaacatcatgccaaaagaacagagccattttgtaagaaacaacagtctagttgaataaatggaggtgataagttagatatggtgaagaactcaaattttaaaaggcaagagacactttctcatgactgaagaagagaaatttgtattaggagatatacctaatgctaaatgatgagttaatgggtgcagcacaccagcatggcacatgtatacatatgtaacaaacctgcacgttgtgcacatgtaccctaaaacttaaagtataataataataaaatttaaaaaaagttagttataatgtgggatctgaaataatagtgataagatattcataactgtggccattaaaatccattgacctatagtttttttgttcatgcatgatttttttttttgagacagggtctcactctgccacccaggctggagtgcagtggcaaaatcatagctcactgtagcctggaactcctgggctccagcaatcctctcgtctcagcctcccgattagcaaggactacaggcatacaccaccacagctggctaaatttttgtctgtagtgaaaagggaaaataatgtcttagttttactgtaaaatagtattgccctcataggcaccccaaaagggtcctcagcccacactcctagaattgatgccttaatactatgcaattctcaagttgttattactaataaattaaaaaattaaaattctctttgctgtattttttaaaagagtgaaaatgtactttacaattctatattactttattatcaaattgtgaatgagttattaccaatgttgtagttagaatttcttttcctctcctagtttttatttctgtgggtatagtcggtgtatctatttatggattatgtgagatattttgatacaggcatacaatgcataataatcacatcagcatttatcctttctttgtgttacaaacaatccagtcatactcttttagttattttaaaatgtccaataaattattgttgactataaaaaaaaagaagagaaatttgtagaaagaaaccaaacttctaaatttatcttcgattcaactaattagcagtagtctcaattataaaacctgaatctataatacggtctaacttaggtgtaattagatgaaaatgtagtacttttctggtgagttaaatatgtgatttttgatttataatcacatcacaacaaattggttgagaaagaatgaaggtaaagaaaagattaaattttattttggcctttagctcagttttatgttcagatggtagtttcccagttatagcaaaactgtacttagcccctccttagttctaggaactaagttctaggaagtaaggagggactaagtacagctttggcataattgagggtgtgactttgatgtttctatagattttcatatctctgcaataaaacttaaattgcttatgctgtttctctgatataaaatacagagttttccaatgctctataaaatgtaatttagacagacgaacatgaaactgttcttaaacttggattgcctgggattctgaaatttttctggttatttgttcaaattgatacctgactatgatattcacaacatttcttgattttcccaacagctgctatacaatataggatgtatattgaattgaaataataaataggcgggaaaaaatgagaggaaaaaagataggtacaaacgaaagaggaaagaacaaatgtaaatcatcgaatagttatgatcacatagtgtgagtatgtcttacttttggttttttttgtttttttttttttttttttgagacagtctcactctgtcacccaggctggagtgcagtggtgcgatttcggctcactgcaacctctgccctctgagttcaagtgattctcctgcctcagcctcccaagtagctgggattacaggcacctgccactgcgcccggctaattttttgtatttttagtagagatggggtttcaccatcttggccaggctggtcttgaactcctgaccttgtgatccacccgcttcggcctcccaaagtgctgggattacaggcgtgagccaccgcacccggcctcaattttgtttttaagatttctacctgccaaggcaaaatatgaaacttgactacttacttgattaatacagaccacaacttaaaaacaaatcacttgcttaggagaaacacaagtattatcaacataaaatccagaaggaggctgggtgcggtggctcacgcctgtaatcccagcactttgggaagccgagccaggtggatcacctgaggtcaggagttcgagaccagcctgggcaacatgtgaaacccagtctctactaaaaataccaaaattagctgggtgtggtgatgcacacctgtagtcctagctacttgggaggctgaggcacaagaattgcttaaacccgggaggcggaggttgcaatgagccaagatcacaccactgcactccagcctgggcgactccgtctaaaaaaaaaaaaaaatccagaaagaaataaagaagactttgtataatgcaattaatgacaccttaacaacatcttgattagagaatagtcaagtttcccaaattccactgagctggtttcatgagttggtagactgatggtatcacataaaaagtcctgcaaggtcaattcagtagtggggcttcaggtccagttagataattcttttagaacttaagtttgggataactatttttctttccacctcatgtgttttgaactttcagggcatatattacaacttataacgtatcgctgtcactcttagtctgagcgctcatgttgaaagcacgcactgtgtgagctgtcatctcactgtgaatcagcaggaagggtgagttttcataacatcagtgaaggatgaggtaattattacagaattggtttttggaatacatgataaagaaattctgagaaaaaagtgaaggtcttcagttccctaatggataacaaaggagaacttaacctgacaaaaacgtccaggaagagtttgtatgttcccctaaaaatggaagcatgttagtaacgaccttcaattctttctggaatgagggggaaattccaaaaataaactaaataaaataagcagtaagatttctttgaatttaagggagaagcacattctcccagttaagaaaggtgtcttctgtgaagctgcctagggctacagtcaaacagattccccctgacaggtgtggaacttgtcttcactctgcagaatggcctgttcattgtatttcccttggcatgtgattcaggttgttggagaccttggtaaactcatcatattagatcatgggttgatgtaagttcatgtttggatgttttaaaattggttggaacctggctaggggaagaacgtatgtctacaactggccctgaaagagattaaacatgtttgaaatgttttcttaatggcagtggagtgggtagtaatgtttcttttgctgtgagccagcaagtgtgcctgttaggagagcattcccgaactcatgatgaatcaaagactgattaactgtactttaagtacggcatctggaaattgcttgtgagagagattttgccatcaattacagaagacacatatgtcactggatttaggaccaaagacagggacaaccctttatcaaactgatttctactttactgtgggtcctcttttaatgtaaactttcggacttgctgcttcaaaagtagttggctttcttctgctagtgatatgtaaagaatgaatggtgcccataattgttataaatataatatgcagagttatatttaatttataacataagtcaccagtcaaaaagacagtttagttttttcctatgacaaaaatccaatcttactcagtaaaacaaatgatttacaactcattgcttttctgagactagtatttactgtgctataatttcaggcatttaggtttactgaaggcataaggtatacttttttagatgttaaatttttagatatggttgattgggggaaattaacaatttcaatgtttgaagtggtaaacagctcatttctgcagggagtgataattgggaatgtagatcattggagatggactgaatttaggaacatcatggttgtagatgtggatttaggagctatctgcttagattttgagtcttttcccatgatactctaactcacaggaacggaactgttgctgtatctctctatacttacaaatggtgagggattatctcttgagctgaggggacagattagaccctggagctgcaaaccctaggtgtatatccagcaacccctggactggtactttcattgtgggatgtatacatccttttaaatatcaacagaagaaattttcagaggttttaccttgattttcctaaaagaggaagcaatcatagaactgaattccttttcataattcttcaaaattgattggagaagaaaattgccttttctctcctgccttttcattttgaggaacccttaatgatgtcacttattttaaatcaaagatgcttatttattgcagcatctgctcagtcctccatttcttcctttcctctcctctcctctcctcttcttttctttctttctttttttttacatggagtctcgctctgtcacccaggctggagtgcaatggtgtgatctcggttcactgtaacctctgccttctgggctcaagtgattctcctgcctcagcctccagagtagctgggattatagacgcacaccaccatgcctggctaatttttgtgtttttagtagagacaggggtttcaccatgttggccaggctggtctcgaactcatgtccttacgtgatccaccagccttggcctcccaaagtgctgggattacagtcatgaaccaccgtgcctggcctcagtcctccatttctaaggcattgtatcattcagtggttgtttaataaccttagacaaaatctaaggtttaacaaccactgaatgttacagtggttcaagaatacagtgatacaatggtccaagaattgaaccaactctttttaacctgttttttttttcattttctttctttttataccttatacaaataaaatatgactgtgtttttattttcatagtataaacaatatggaaaataaaaagctatatgatacagagcataaataatggagcagaaagtgaaagtctctcttcaaacatttgccctgagcctactgaagagttattcatctactctcttctctttggatttacacgcatttaaatgtacatgtagaaagatactaacttgtgttttgcaatagataaattgacttgtctcatgtataatgatcaataaactgttaacctgaaaattcactttgtacctcttaatggctggcagcatttctatattaaaagaaacgtggaaaaatagcaaaactctacattcctgaagtttatttttattcagagttgggtgtatttttttgggggggaaccattggtactttttttatacatggtagactaaattataatgttttaaaaatcaaaaggtatttggagagatggaaatatgatttgatgatttctactaactatatgtattgtctccataatattttcttaatttaaaaaagtggttaacttatgtgtgtttggcatatttttgagttgataatctcaaataattcttcacttattacacatacttgaaaatctgctctctcagtttttcaagttaaaagtattctgtccttgtggatctgtcatttcacagacatacctgtttgctttgttggctaggtgatagaaaataaagggcagaacataagaaattatccttcattggatattagttcgttctctcatctggattttaaagtattactggaaaaaaatcctctaatcttctattaaagataagataagttcttacaatgtataggttgtttgtaggactgagaagtattggaaatatgtcttggctcaactagttggccacccttgagagccagtaataccaagtggctaagcttagttgcacccagtggcaagagacattctgaggtttcccatgtattgggaggaggcccaagacaaagaggtccttgtaaaactcagctagagacttggctgtgggacagagtcctagaagaatctacattaactgtgccctgcccagaggcatgctgctacagcctttgtgctgggaaccaccaggatcatggtatgagtttgcgtctccaggtagacactctgagcttcttttgcttactgaccctgttactacccctgagcactgcagctgccgtgtagcatcatacatcttctctgcaaagtcatattacactgagattgttagaaactgtctgtcctttgttttcatgtgtgtggttgttgctgtagaagataattacttatccttacatctagctttctggcttgatacacacacacagacaaacacacacacacacacacacacacacacacacacacacacactctttggcaaaagaaatgaatgtattggtgaatcttttttttttttttttttttgagttagaatctagctctgtcgcccaggctggagtgcagtggcgtaatataggctcattgcaacctccgcctccgaggttcaagtgattctcctgcctcggcctcctgagtagctgggaatacagggatgtgccaccacccctggctaatttttgtatttttagtagagacagggtttcaccatgttgattgggctgatctagaactcctgaccacaagtgatccgcctgcctcagcctcccaaagtgctgggattataggcttgagccaccgtgcccagccagcattggtaaatcttatgtataattttaaaattaaccaatacattcatttcctttggcaaagtataaaaagcataggatttgaatttggaagaccttggttcaagttctgcttctgccacttaatagtactgtgacctttctgaggctctgtttccattttcattccccatcttggttgaggcttgtgagcttcaaatgagataatatatttaaaagcattttgtgaaccataaactgccacacaaatgttgattattgttaatattttatatttagtcttgctggtacaataaaaagttagtaataaatgccccatgagctgtcttaattccagagaagacatatgaactaatatacccagcttgggtcatcaaaaggtatatttatataagggttactgctaagcagtgacaatcacgggtgtgctaatttcatcctgggatctgcaagcagccttaggtggagaaaagaggaggcacagaacagagataaataaaggcttagtttctacacagccttgtgaaagactgtgttttaagggttgagttcaaccattaaggttgatggtgttttatagtacttattgatgcttaaaagtaaaatttatcaatttttaaaagaatagttttatgagtcaccaaatttataaatatggtcaaatgtgtattccacacttttcagagaaattatgtagctcttctggtaacagtgagagtcctttgcttacacagtcaacaacataggaaaagagattcagttttcctatggcaagtttcacatcctggaaaatgttttatcagttggatgctggggccatctctaggttagaaagtgtcaatgggaagtagttcaggttcagatatgggtaggatctgtgcttcctagtttggagaagggtttctgatgatgagttgggatttggttttcattcttctggcctcgtagatgagtggccagtttcatttcattgattggctctatcttcagtttatgtgctcattctttccattggaaactcctttaactcttctgctgaaaatgttctctagggttcaactttagggaaatcttagcaaattttatttattactctagctattatgtttattttcataacagcttttctgaaggaggacatctaacacatctaggtgttcataatgtgagcctcatttgtattttcagagaaaagttttatcttgagtttgaatgaactgtggaattagctgagttaagagactctcatttttgctatccatgaggcagaaaagtggtgtgaaggatatatgacttcagccaattgactactgaccagtctttctattgtttaggccataggaaatagggcatttggagacaggtgctaaggaaatgagtagcacttttgtgtgtgtgtggttgtaggaaccactgtacaccctagaacactttattaagaccttactgcttatgtaattgaaaagacattgattgagctacaggtacctggtcagacattgagagacctgtacttggtctcaggatgctctgtgtagagcttccccaggctgttgggagctgggagactgcttggcctggacaggacccagaataagaagcatggtacctcctataagcctccgagtaggctgtgggcttcaagatggctctcaggatgatcagagaggtcaggagtgtaggcttaagccagggcccagggccaatattctctgagatgagtcaagccccaaccctctctggggtttccagaacaaaggcttgatttggggagccagcgttgtggagagggcagggggcatgtctctaggcattgctggaactgagggagattgtcagagtggctggggtaatgtttgtataatccgtggcagttggtccttcctgcatgagagtgggaggttgaatgtcccttatgggagagtcatacaccagggctgggctggagcagccagccagagggcgttggggcagtggctctgctggggtgaccaaagtagggaaggaaagccacttgttgcgcacaccccattttgattaactgctttcatgcaggatgaggcagggataggatcatttctcaggcccaggtattgatgttttcttaattctttagtctggaagaacttgatgagagggcaggaggatgttaagaatttccttaatcaaacccatttttcatgtctcctagggctaccccttcatctgcacatctgcagagaataacctgactcctctcacttctccagcttttctcacaaggcagttgttactggactgctgagggaagtggaagggaagcctgggagggggctctgatggtggcacccaatatacagggtctggagtcagggtgaaggaggtcagggactagcgtctgccatagcacgggcacacggccaggctaatgatgagcagcatggccaggaagaaggtggctgtgagctgcagccacagcaggactgctgagagcacggcattgaccaccagtgagcaggacacaacgaagaggcatgggatgctgctgctgtgcttcatgacagcggacatgacaggagcagtccatttagccctgcctcagcaccacaagttctgcccatgctgacaagccttccaggaggcctgggccggggccactagcggcatgcagatctagattcaggagcacaccaaaggtgtagaggaagacattctgaagtgccaggggcagctgccgtctcttcatgagcagctctgtatgcagtgacgacaggcttgagatgaggcagtccaggatgaggagcagcaggcccagcggagtgatatgtaggggcatggggctggcagcagcttctggagggggcctgggaagggtgtttcgaaggtcttacaggccatctggtggatagcagacccccgcagccatctgcagcagcagtgcaaacccctgaggtgcagagaagcagtgctggaggcagagacagtggaacagggcccgcttccaatcttgagattgctcagcacgtggtaggtgctggggtccatgtcacactgaagatagatcaccaggttgttgttagtgccatagatcagggctgatcatgtgaagggagcagcttagtgccagagtgggggccccctacagccatgcttgccagcccactagaagggagaaggtgcttaacagtagcttggtcaactcagctccacagctgaggagggctggaaggacacctggctgtccacatggcacagtgccagcatgggggatgggcaccacacgtggcagtagataggagcagcatcaaggtccattacactcatacccacaccagaccttgggtggctggtgtagttagcaaggggagtgggattgcaacatatttacgggaaatcaagttatggagccacctcccagtagggaggagccgtggaacattgccagagaggatactgaggatcagagtcatctgccaactccatagtcagggcttgaagagtaagggactggtggcccttgaagccacagtcttggggccagtctgacggagttaggagagggaagaaggaatctagggtgcaggctgacaaggtgctgtgcacactctgcaggaagggaggcaaggataaaggcggcatgaaagttggagaaaaaatggatgacagccagggaatccagatagtagtgtctctacctgcaggccccagctccttattctgcctccctcatagcatctagagctattcgggctcttgcatagtgactgcaaatagtcagtctttcaatgtcatctccatgttgggcacagcatagcctgagctgcacagattgccagcgcaggtgccccttgcaaagcccaatacagctgatgtcttcagtttggccaccacagccagccaggaatcccttgaggaatggggaggacaatagcgagccatcccagccacctctgctgttgactttgtcttccatgtgccgctgcaggcaatccagctggttctcgagaaatgccaggtccttaagcttaggcagagaatccttgtcatctgtcatcttccccaccaaacttctgaagagcactttctataagtcaaaagtaaggcagtcttagttttattctctatatttgatgtttggtgcactgcaaaagatggcatagcttagtaggatgttattttatttcagttgcaagataggaagggcattgataattgtagaaatggggaggggttacatatatgagtctgaggctgtatatttagtcttctgagctttggaaatagagatgattttttttcagtcttagcaaaggaagtattttaaaatttcagaaacaatcaggctattaataaagtatgtttaagtggtagagagagcaatgcactaagaataatgattttttaaaaatcttgattctgctagtaacttgctgagcctggacaagtcccttaatgtttctgaacctctgtcttcttacttataaaatgatatttctatataacttaaaaggtcccttccagacctaaaattctgtgactctgatttttctctatgctcataatgattctttgcttacttccacagagtatgaaggtaacaggtatcccttatcaatgaaaattacctttaaaagtataaagcagcaaactgtgttgcaaagggaaggtatggaaatgagctgtgaatcttgaacctaatggggttgcctgtagctcattctctttgatgtgcgctacctgcagtgttcactcctggtgtgctgtgattctggaagagaggcactaggtcttgaatgtgtagtttttgacagcctgtttctagatgggacacacatctagacacacatcatttcaatggtgaccttcaagggcaatgatgccccagccttcaatgtgtaactcttaggtaacactaaaattggaacttggcaatcatataggaaaagaggataatgtcatgttaggcctaaatagggtattttggggatggaaaacatcaaagtctatactctacccaagtatagattttggtaaatggattttagacagattgtttttcaagctccgttatgtctccttagactttttcactttttgtagtaatcacttttttctgatgtttacaatattctgttataaatggggcttaccatctgccattaaggaaagtataaaaatcaggctgtgccagtctttttctctccataaagtaatttccatcagacctcattttcctctgctttagtctcttctgcgaatgtggtagtgatcttaagttatatagcttgtaaggtgaggcacattacagatacaaatctgaggatttagctgggcaagggagggagagaaatggtaagaagggaggtagaggagtttattgattactcatgtaatgcttcattgtgagtaaagaaaagcagattggtcatctataataaaatgtagcccaaatggcatttgcacagttgtaaggtttatttcacagcaaatcagtatgcctattagcatttcacacatatccctgtctctctgtcaagaatgtttgcagattctttgttgttcatgcttaaaggcactttttatcttctgttgtcttgctaatggacctcctcttgaaaaacaactcttcctgtctacacagatgaatctcttcatgactactgtgtttcagtttttgattagctccttgggaatcacagtttctgttaggatgagcagaaagaataagatgggaggccgtaatttaacattgtaattcaggatcaaaatcataggcttttgtgtgactttgaagtcttcctgctccttctaaacagaattgcagctatagcatcccagctaggtgtttttcacatctctttttcttcccttcgtcttcttcttttacttccctttcttcttcccctccctcccttttttccttttttccctcccttcctccctccctccgtccttcctttcttctctgtatttaagtacttgcaataaaaacactgacacttgcctgcatcttgaaaaccccagattcagtttcatcaacatctgttgaatgcctattatattcttgattctgtcctaggcctattcctatgcattgtcttatttaatccccataacaattacttgaaaaagctatttcattcccattccatcgatgaagaaactttggcctgattcatagagctagtatgtggcagaggctgaatgtgaaattacatcttctgaattcttcctttactgggtagaaactctgtttcatatgggaagttgtattagggttctccagagaaacagaaccaagagggtatatggagatatacatgtgcgtatatatatttattataggaattggctgttgtaattatggaggctgaaaagtcccacagtctgctgtctgcaagcttgagaccagggaaagccagtggtgtaattcattctgaatccaaaagcctgagaattggggggccaatgtcctggtgtgagtctgaaagcccaagaaccaggagtgctgatgtctgagagcaggagaagatgaatgccccagcttaaacacaaaggtgaattcacctttccgccatctttttgtttgattttgtccctcaccaaattggatgatgtccaagcacattggttgggcaaccttctttactcagtctactgattcaaatgctgatctcgttcagaagaggcaaacctagaaataatgttttaccagctgtctgggcattccttagcccagtcaagttgacacataaaattaattgtcacataattgctgttataaaaggaactataccttagtgtggaagtaagccagctatgattaagtgagaacatgtgaccaaattctgggtccagattctcaatgactgattcagccttgggcaaggttttgacctttgtattttagaatctctactgattaaaaagagatagtaaaagttgtcttagaggagtcttaatctatagctgtctgtatttactgaaaaaccttacttttacaaaattttaattttgtggacaacttggaactctttagttgggaaataaattccagcatagttgttttaatagcactgcaattaatagaagttatattatctaaatcaattgttaacaaatatgctcagttactgggcagaatcttatttgatgggaatatcaatacatatttgttgaatacctactatgtgactgacaccttacattcatgagcttatttaacccttatcatttctgtgagttctcaattacttgcctcaaagaatgaggctcagaggaattaaataatttttccaaggtcacataactagtaggtggtgaagttgggatttggatctttgaatgcacaaaaatagcacaattattactagtgtgggattttcagttagatttaagttccagttctgtctcttactagcagtgtaacctttggtgattgacttaatctatctaaaccttcatttttagattgagctacttaagaggtctgttccattctaaagattcaattgcaactgtccctttagcatggcctgacacagtgagtgaggtatgcaatggcacctgtttataagggtttagcatgttaaatgaaagatgaagcataaagatgaaatgtgagcatttttttcataatgtatgctaaaatgttaaatcatgcagttttagcaaaagatactagtgtgatgcatgtgttatattagacagaactttggagtagagctgggatatgcaaaacctttccccatctttaccactagcacactgtgaatctcagagcatattatttcacttccgtgtcctctgtgtttcatctgttcatgcattcataaaacatctacagagagacagcagtgtgtccaggcacactgtacgaggaatctaggaactggaaaaggagctaacacgtggcgtctattcccgcatgggccaaggaacttatagcctaatgggaggagagacagacatatgaagattttataatgcagtgtgaaaagtggtattacagtgttcagagccaggggaggttttatggaagagctgacaattgaagaagcaatgaagatgagaaggcactctgccttatttatctttatagtaatatttcctaaagcattgagtgcagtgtccaacacatagtaggcactcagtagtgaattggatactgatttgcaagctggacttgttttcaacaaccattccttcctatgtttcttgttatagctcctctacctctttagggagctccacagggactcagttcaagtccctaattctcttagtgacagtacaccagggtggttaagagcataggttctgaagtcagacttcctggtttcagtttctgtctttgctatttgttagctgtctgaccttgagcagttagttagctttctgtgcctctgttttcttgtctataaaatgggataataggctgggcgcggtggctcacacctgtaatcccagcactttgggaggctgaggcgggtggatcatgaggtcaagagattgagaccatcctggccaacatggtgaaaccctgtctctactaaaaatacaaaaattagccagacgtggtggtgcttgcacctgtagtcccagctactcaggaggctgaggcaggataattgcttgaacccaggaggcgggggttgcagtgagctgagattgcgccactgcactccagtttggcaacagagtgagactccgtctcaaaaaaaaaaatcataataatacctagcattattaaatggaaaaaattaaatgcaaagaactttgaatttgaatggagactaagcactaaggatagtaattgcataatgaaagttagcaatttttatttttcattttgatacattttatgctgagttcatttattagagtgccacttcacaaataactcagttacctgcaaaaatagaatttttctgattgacagtgatcaaaaagaaaaggtgacttattttaggaaagatgttgctttttcttcgcctgctcttgctttaaagaatggatcataaggttctggttaatgtcataaggagctcacatgtattttgctaattataagtcatgcttctcagtgacccttttaactgttaaaatgacctccagattctgatttttcttcactctttattaatggttaacaaactgtttaatgcgcggtaggaaagccaagtaagcctgaagcatttagaaaatggcatgtgaattagttgtaaactgtttcagtaaacattaaatgggtggcaattacttaaagtgattgcctaagtttcattaaagtatttaaaagaaaaaatatgtgcttaatgctgccttaattataaggaacttactacagtagcttccatctagggtttaccaaattagcctaattcataacctcacccagggcattgtatgcacatgcattttatacacatttctgatttcccccttcaccccatgcctcactgagactcagacctggtaatctgtgtttttaattatttaaggtgaatcgctgatgagacctggttggaaaacacaggtgttgtctggttaaaagcttggttttgattttgcattcaacaattcaaaaagctcttaaagatacttcagtataactggttaccaagggttaattgtggtgaatatagaatgagagtagctgaggaaatggaagtctgtgatttttgattgccttgttaaatcgtcaacagcagcagcaccaccatcattgattgggttatggcaggaaatgctatagttagatttgctacaaattagtttagatagagagtatgggtgaaaataaggtaatcttttcagatgttgtctgataaatggaagcagtgcattcatgagcagagctgcaaaataaatgttgagtacacctttgaaacaaggttgcctaccgtgaattatagcaaacaaacggaagtattctcaaggtgtgtggaatcaataaaaaccaaagtgtcaagatgcaaagagcagtcagcttgtataggtgcccacaactactaatcataacttgataggtgtggaaagaactgctgaataccctccctcttacactgccccaactatggcactgccctagatagccttctaaaacacacacctgattctgccactccctgcttgcagccctcaatacttttctattcatatgataggataaagtctaaatgccttatcaaagtatatagggccattcaggatttatctactatatactcttatagtcttctttctcttctcttgccacattttcatgttatatgctcaagccaactgaagtctatacttgtaggcttccgaagtgctttgagaaaaaaaatcatataccacattgttctgttatagaccctaacacagtgcctagtaggggctcaatatacatagtagttgtttaataaatgtttattgacaaatgaataaatcaaaacacaattactgtaatgatctcattacatgtggatttttcccttttgggatataagcccatccagagcactatagtgtgcacagttactggcacataatagtcattaagagtttatggagatctggcaaaatggccaaataggaagagctccagtctgtagctcccagcgagaccaatgcagaaggcgggtgattgctgcatttccaactgaggtagccagttcatctcactgggactggttagacagggggtgcagcccatggagggtgagcagaagcagagggggttgtcgcctcacccaggaagtgcaaggggccgggggactccctcccctagccaaggaaagccgtgagggactgtgctatctggcccagatactacgcttctcccatggtttttgcaatccgcagaccaggagattcccttgtgtgcctacaccaccagggctctgggtttcaagcacaaaactgggctgctgtttggatagatgccaggctagctgcacgtgtgtttttttcgtaccccagtagttcctggaaccccagtggtgcctaggaaccccagtgagacaaaaccgttttctcccctagaaagggggctgaagccagggagccaagtgatctcctgcagtggatcctactcccacagagcccagcaagctaagaaccactggcttgaaattcttgctgccagcacagcagtctgaagtcgacctgggacgctcaagcttggtggaggcaggggcatccaccattactgaggcttgagtaggtggctttcccctgaccatgctaaggactggacgtaactcaacacagcacagcaaagtggctgtggctagactgcctttctagattcctcttcactgggcagggcatctctgaaagaaaggcaagagccccagtcaggggcttataaataaaactcccatctccctagggcagagcacctgggagaaggggtggctgtgggtgcagcttcagtggacttaaacattcctgcctgccggctctgaagagaccagtggatcctgacaaggagggttctcccagcgtggtacttgagctctgctaagggacagactgcctcctcacgtgggtccctgacctgcatgcctcctgactgagagagacctcccaacaggggttgacagacacctcatacaggaggaaggagcaggcaggaatctttgctgttctgcagactccgctggtgataccaggcaaatagggtctggaatggacctccagcaaactccagcagacctagaggagaggggcctggctgttggaatgaaaactaacaaaacaagaagcaataacgtcaacatcaacaaaaaggacccccacacacagaaaccccatccaaatgtcatcagtctcaaggatcaaaggcagataaatccatgaagatgaggaaaaaccagcgcaaaaatgctgaaaattcccaaaaccagaatgcctcttctccttcaaatgatcgcaactcctttccagcaagggcacaaaatgggacaccgaatgagtttgatgaattgacagaagtaggcttcagaaagtgggtaataataaacccctctgagctaaagaagcatgttctaacccaatgcaaggactctaagaaccttgacaaaaggttacaggaactactaactagaataaccagtttagagaagaacataaatgacctgatggatctgagaaacacagcacgagaacttcgtgaagcatatacaagtatccatagccaaatcaatcaagcagaagaaaggatatcagagattgaagatgaacttaatgaaataaagcatgaagacaagattagagaaaaaagaatgaaaaggaatgaacaaaacctccaagaaatatgggactctgtgaaaagaccaaacctatgattgattggggtccctgaaagtgatggggagaatggaaccaaattggaaaacatacttaaggatattatccaggagaacctccccaacctagcaagacagaccaacattcaaattcaggaaatacaaagaacactactaagatactcttcaagaagagcaaccccaagacacataattgtcagattctctaagcttgaaatgaaggaaaaaagaatgttaaagggcagccagagagaaaggtctggttacctacaaaaggaaacctatcagactaacagcagatctctctgcagaaaccctacaagccagaagagagtggggcccaatattcaatagttttaaagaaaagaattttcaacccagaatttcatatccagccaaactaagtttcataagcaaaggagaaataaaatcctttgcataaatgctgagggattttgtcaccaccaggcctgccttacaggagctcctgaagaaagcactaaatatggaaaagaaaaatcggtactagccactgcaaaaacacaccaaaatatagagaccagggacactatgaagaaactgcattaactaatgtgcaaaataaccagctagcatcatgatgacaagatcaaattcacacataacaatattaaccttaaatgtaaatgggctaagtgccccaaaaggcacagactgccaaattggataaagagtcaagacccattggtgtgctatattcaggagacccatctcatgtgcaaagacacacatacgctcaaaataaagggatggaggaatatttaccaagcaaatggaaagcaaaaaacaaacaaacaacaaaacttaggggttgcaatcgtagtctctgataaaacaggctttaagccaaaaaagatcaaaaaagacaaagaagggcattacataatggtaaagggatcaatgcaacaagaagagctaactatcctaaatatatatgcacccaatacaggagcacccagatttataaaacaagttcttagagacttacaaagagacttagactcccacacagtaatagtgggagactttaacaccccactgtcaatattagacagatcaacgagacagaaaattaacaaggatattcacaacttgaactcagctatggaccaagcagacctaatagacatctacaaaactctccaccccaaattaacagaatatacattcttctgagcaccacgtagcacttactctaaaatcgatcacataattggaagtaaaacactccttagcaaatgcaaaagaatggaaatcataacagtctctcagaccacagtgcaatcaaattagaactcaggatgaagaaactcactcaaaaccatgtatgtggaaactgaacaacctgctcctgaatgactacttgggtaaataacgaaattaaggcagaagtaaagttctttgaaacctatgagaacaaagacaaaacatactggaatctctgggacacagctaaagcagtgtttagagggaaatttatagcactcaatgcccaaaggagaaagcgggaaagatctaaaattgataccctaacatcacaattaaaagaactagagaagcgagagcaaacaaatttaaaagctagcagaagaaaagaaataactaagatcagagcagaactgccctcactcagcaatgaggagcctgagcaaatgtgcaaggctgtgagagagagagagagagagagagagagagagagagagagagagaaggagatagagacacgaaaaacccttcaaaaaatcaatgattgcgggagctggttttttgaaaagattaacaaaatacattgactgctagccagaccaataaagaagaaaagagagaagaatcaaatagacacaataaaaattgataaaggggatatcaccactgatctcacagaaataccaactaccatcagagaatactataaacacctctagcaaataaactagaaaatctagaagaaatggataaattcctggacatgtacagcctcctaagattaaatcagggagaagttgagtccctgaatagaccaataacaagttctgaaattggaggcagtaattaatagcctgcaaaccaaaaaaagcccaggacctgacggattcacagctgaattctaccagaggtacaaagaggagctggtaccattccttctgaaattattacaaacaatagaagaagagggactcctccctaactcattttataaggccagcatcatcctgattcgaaaacctggcagagacacaacaagaaaagaaaatttcaggccaatatccctgatgaacattgaggtgaaaatcctcagtaaaatactggcaaaccaaatcaagcagcacatcaaaaagctcatccaccatgatcaagttggcttcatccctgggatgcaaggctggttcaacatatgcaaatcaatgaatgtaatccatcacataaacagaaccaatgacaaaaaccacatgattatctcaatagatgcagaaaaggcctttgaaaaaattcaacaccccttcatactaaaaactctcaataaagtaggtatcgatgggacatatttcaaaataatgagagctatttatgataaacccatagccagtatcatactgaatgggcaaaagctggaagcattccctttgaaaactggcacaagacaaggatgccctctctcaccactcctattcaacatagtattggaatttctggccagggcaatcaggcaagagaaggaaataaagggtattcaattcaaataggaaaagaggaagtcaaattgtctctgtttgcagatgacatgattgtgtatttagaaaaccccatggtctcagcccaaaaactccttaagctgataaggaacttcagcaaagtctcaggatacaaaatcaatgtgcaaaaatcacaagcattcccatacaccaaaaatagacaaacagagagtcaaatcatgagtgaactttcattcacaattgctacaaagagaataaaataccgaggaatacaacttacaagggacatgaaggacctcttcgaggagaactacaaaccactgctcaaggaaataagagaggacagaaacaaatggaacaacattccatgctcatggatacaagaatcaatatcgtgaaaatggccatatggcccagagtaatttatagattcagtgctatccacatcaagccaccactgactttcttcacagaattagaaaaaaactactttaaattccatatggaaccaaaaaagcccacatagccaagacaatcccaagcaaaaagaacaaagctggaggcatcatgctacctgacttcaaactacaaggctacagtaaccaaaacagcatgttactgataccaaaacagatatatagaccaatggaacagaacagaggcctcagaaataacaccacgtatctacagccatctgatctttgagactgtacaaaaacaagcaatggggaaaggattccctatttaataaacggtgctgggaaaactggctagccatatgaagaaaacagaaactgcaccccttccttacaccttatacaaaaattaactcagatggattaaagacttaaatgtaaaacctaaaactgtaaaaaccccagaagaaaacctagggaataccattcaggacataggcatgggcaaagatttcatgagtaaaacactaaaagcaattgcaacaaaagccaaaattgataaatgggatctaattaaactaaagagcttctgcacagcaaaagaaattatcaccagagtgaacaggcatcctacagaatgggagaaaatttttgcaatctatccatctgacaaaggtctaatttccagaatctacaaggaacttaaacaaatttacaagaaaaaaaaaccaacaaccccatcaaaaagtgggcaaaggatatgaacagacacttctcaaaagaaggcatttatgtggccaagaaacatataaaaaaagctcatcatcactggtcattagagaaatgcaaatcaaaatcacaatgagataccatctcatgccagttagaatggtgatcactaaaaagtctggaaacaacagatgctaatgaggatgtggagaattaggaatgcttttacactgttggtggagtgtaaattagttccactgtggaagatggtgtggcgattcctcaaggatctagaaccagaaataacatttgacccagcaatcccattactgggtatatacccaaaggattataaaacattgtactataaagacacatgcacacgtatgtttattgcagtactgtttacaatagcaacaacttggaaccaacccaaatgaccatcagtgattgactggatatagaaaatgtggcacatatacagcatggaatactgtgcagccataaaaaagaatgagttcatgtcctttgcagagacatggatgaagctggaaaccatcatcctcagcaaactaacaggggaacagaagacccaacactgcatattttcactcgtaagtgggagttgaataatgataacacatggatgcagggagtggaacaacacacactggggcctttcggggagtggggtgcaaggggagggagagcattaggacaaattcctaatgcatgtggggcttaaaaccaaatgacgggttgacaggtgcagcaaaccaccatggcacatgtatacctatgtaacaaacctgatgttcagcacatgtatcccagaacttaaagtaaaataaaataaaataaacagtttgtgaatttatcaataacctgatagaattacagactgcagtgcgtactcataaggaactcttatttattcatgctgttgaagggagattggataagctagacatattaaataatagtatgtttgattttcttggagtttataaagttatcaagctgaacagtaactatctgaatcttgagagactggaaatttggctgacttcttttaggtttcttcctttcccacagaattctttgtttctccctctattctgtgccaattggtatcagacctaaaactgatgcagaccctgtggatttaggcagagctgacctgtccagagttactctcctaatagtttacagcccacctaggtttagaagacagttgttttgaactatataattactttggcttgagttggattctctaggaaaacaaaaaatagacaaaagacattgaatagtgattacagtttttaatcatagttttattatgataagaaactgaaaggatgcaaaagagttggtcatacttacctggattcaggtcaagccattgccaagccatggtacaggcactgatgtggacctttttcaatagaggcagagaagacttaattttcagactgggctctaagtacttctggggttgagtacagtataaatatatttacctgaaacatcccttttatttgggtatttggaaagagtatttttataataaggtaaacctagaactattaattttaaatatgaaatgtgaaagtctttaaagacaaagtatggaggtttacagagatattttgaggctgggtggatgccttagttattctgtctgattaaagtgttgaagaacacacacattatactaaagtattggtttgtaacatggaagatttaatgaccatagcatagacattaagtctttgttttttgagttaatcactgagggaaactgaagttccatttcaccacttcctgggtagtgacagtggtacaatctttagcttcactttgttgcataagaaaccagttaggatccaaagctgcaaagaaagatgcatttctgcctttaagaacaagtttaaatcatgaactgctttatttagagccagttggaggtagcatactgctggcaattccaaaccatttaaaaaacaaaagttatggttattaatttttgaagccacaaaagcatgaatcaacattatagcagtgtcagtatctcagtaggaactagtttcaactgaactgtggcagcaaaataaatgtttgcagattgttttgacaaaatgtcatcctctgggcttcaatttatttgccaacagccttacttttgaaaaagtcttgctgcgcttgaagtttagaagaaaaccctccctctgaacattctggaccttaacaaataactctatctgcaagcatttgtaatgtggatctgcaaatgttttaataggaatggaatatgttgctaagagatgtgtctgtaaacatctgtttgacatatttcaccatggtggagattagggatccctggtacccctggtggtacaggccgtttttttaaaaacagaattcacatgtggtttttgaaaattacttatttatttattatgatttttaaaaatttaatttaaagttccagatacatgtgccaaatgcgcaagtttgttacacaagtaaatgtgtgccatagtagtttgctgcacctatcaacccatcacgtaggtattaagccctgcatgtattagctatttatcttgatgctctccctcccctcacctccacagtccccagtgtgtgttgtttccttccctgtgttccacatgttctcattgttcagctccttcttataagtgagaacatgcggtgtttggttttctgttcctgcgttagtttgctgaggataatggctttgagctccatccatgtccctgcaaaggacatgatctcattctatgaatttttttaaagagatagaatcttgctgtatttctcaggctggacttgaactcctgagctcaagcagtcctccagcctcagccactcaagtaacaggctacaggcgtgcaccagtatgtcaggctcacatgtgtttataaagttctctagacagggctgtaacagggttgtgtgtgtgtgcgtgtgtgtgtgtgtgtgtgtgtgtgtgtgtgtactgtcagatgattttattcgtatttttctagtgttcacccatcatttgaagcttaggcacatgcaactctaggaggtgagtttagtccctgaaatgagtatcttttttgaaagttgcttgacaagtgtgaagaaaatcattttccaaagcattaacgtcaattttatacaaaattctgcctgcgtgtgtttatatgcatttcatctgactcttaaacagatctataactcccaaagttagaactgacaaatttataggctaagttgtttgagctctggaatgaatttagatagttcttaaagccatttaaaatcagaagaaaataaattaaaaggaatagaagggatggcttgttgaaaagtaaaggaataatggctcaatcccaagcttagtgtaggaaaagtttaatactcattgcaaagtatttggtaatatatagtccttggatattttaaaaagaaaaacaagcattgttattatcaagattttaacatgcctcattttcaaagagttcaaaccaatggctagatatgtttttgaaatctcctgtttggacagtgggatttagaagggtgccctatgttcacaaatacagtagaaatagaaatgatgggggaagcacactatagcaggaagagtacggactttatggtcagacaaagctacataactgctaagtctagatctccccactactagatatgtgatctgggtaatgtatgcaataacctcattgaatacatatcatatatgaatatagaaataatacttaggttatgggaatgttctgaggattaaaggagatatgttcataataagcgctatttattaatagatgttcttattaagtaatatttctaatctagtgtccttaccaaattgcttggccaggaaaaaatagaaagcaagctgtgaagaatctcttcaataaacctcataactgtcttttgaagaggtcttgcaagtggtgatgaattgaaagaataaaaataaaacttgtgataatggaaaatagaagtataagttttggaagaaaagactgcagtggatgtgtagctcagtttgtacacaccccaaataacattggaaagccaagttattgttctcaaagtctttgctcattttaaatagtaatagattcaagatagaggagaaactgatttctgaagtgagcttgatttcagcatgtaaaaggatacattcttttgacttagttcagaacatgctaatttcataggcaaattaaccaattgtcattcacggcaggacataccatgcagacatttcagaacaattttaattgcagttgacatttttgaaatgaattcttggacataaacatctatatgacatggatgtgtcactgtaggagaaaatttagtgttagctgatttaatagctaaagaatacattttaatatttaggcatattttatattagtgaccaaagaaaaaaaccaattagaaattgactttcagaattctgtttagggaattcatttagctgacatcacaagtaactcttaaatagcccctttggtgtgttttaaagtaggattaggtgaatataacattacaagaactaggcattggccagcttttctttgagtatacaagacagaagtttagagtttacttaactataatttatttttatgtaaaccagtaatggagtctgtaaaaatatttaggttcttgttctgaaaaattaagtttttttttttttttttaaggaacatggttaatggctgatttacatgtgttattttgacatgagttttgttctattgtagtagagaattagacttcctaacatctccactatgcaagagtagagagtggctggacatatcttaggctataacaatcttaatatgtgtgtgttttgggtgcagctcagagataaccaatgttgtttaatattcattggtgtctcttggattgctgattctgttttgtttttaagtcagattactacttaaagaggaaaacttaaatggatatcaataggatctgtgaatcaaaacttgttctgtacataaaacatctagattcatttcagtaagttacccttgtgcatagcttagttcctttcaccacatattctttttatctgtgaaccatcgtgcatatttttccttttcattctgtctttggaaatcctcattctattcatgtgctttatttttccattggattttcaggtttacttaggtctctggagttggttatatgcctttacctctttaggtcactttcactgaggtttatctatcttggccacgattgattggaaattcattgaaaaattcattcattatgcaacttctttaggtagttgttatttaaatactgctagttagtgctcactacacatctttgactaaataacagggtaaataaagggtgagaatatttcttggcattattttttccctctaagaatgtcagattcagttttttcaatctttgtattgaaaatttgttggtattacttctcaaagaaaagatgagatcaaaagtgccagaatcaataatacatcagtagattgcttaatataatagcattatctggtctttctgaatataattttataagccagaatcgcaaaatttgattcctccagccatggatgtacctttagtattctcttcactcttcctgttgttattatatgtcaaaaagttggggaagctgagtcagagggagaaggagggatttgctctgtcagaattgaagctgagcaccagattctggtcttataattcggatcccatcactccacctgtgattactgttgactcagggctgtattatctcatgaagtgagttccctgtgctgccactagataggagtgcatttgcagaatcccatcttttgaaatgaatgtgacgaagatccattttctctgaggatataggaatcagctgctgcaaacacttcattgattacttgggggaaggattggagggtctttagtatcttatgtgaattctcctaaaacttattgggaacaatcccttccccttccacaccacttgcaagcaacagcacttctttaattcattttcatattactagacaacttaggtattcatatttaatatctgccttgagctttaggttctttgactcctacatatcaacactgggttgcttttatctcagcttaccctagcttttcagtcttaaattgacagcgtgacctcaagtcttccttctggtcccttcagatttgctgttgaaatttgctgctctggcatttgcactgtggcctcctcttgtggattttggcttatctcgttcatcaggcccagagcaccttccactgcatttgtaggagttccctgactcattctttatacatttctataactgaatctcagacaccccactttgctgaagatttttcctgcccttctcacgaaagagaggtggcagagggatttggacaattttcaggtgaatgcgtaatctctactttacaaggttgctaaagcgttttaccagtgtaattctaagaaagccagatttgagcttatgcaggtcttaaagagtgtcataaatagtcaaaagtgtttccaaactagcttaagctggtacttgatggatctaaacaaggggttgtctgagaaggcaaaggaatctaagttttatgatcgatagttaattaattggaaattcttcacccagttaaggaatagccaagccttacacgttaccccaagccttagaagtgactaaatactttctctaacagttctttctgaacaggatgctgttaataatcaatctcttttgaaatggcacttacttatctcgccactgatgaactgaggttatctctagatgccttgaagtgttatatataggcttctaatataagggattaagaaatgttgtagagatagaatatagtgaaagcggattgtgtcaaagggggtgaattctttacttttgtcagtattactctgtagaatgcataagtttatttgtagcacacttcaatagaaaattaatatccttagccagcccacatacccactctaatctaggttttctatcagctttgtgtagttaagtgatatgaataatttagaaggaagtttatttctataacaaattatgaacctctgcgttaaaagttggtcctaaaaacttagctgattcaattttattatttactgagaatggatttagcatatctctgttggtcatttgggaaggtgcttaatgaggaaaagcatcaacatttacttgtgtttatatttagactcttgtcattcatatgccatttctcaagcagtcgaactcagtttctacaagtggtctttcagcttctggcctggtttttaggtctttgctgattagtagacatatgttgctggtgtgctgctgtgtgctgctaccacagaataccacagacttggtaatttgtaaagatcagacatttattggctcacccccagttctggagggtgagaaatccaccatcaaggttctggcatctggggagggcctgcttggagtgtcataatatggcagaaggcatcacaaagcagaggggcaaagaaggcaaaagagagcaagagggggtgaatccattccccagataatgtattagtatattcctgggggcagaaccctcatgacataaacacctcttcaaggtttgacctcccaatcctaccacgatggcaattaaatttccactgagttttggatggaaaaaacttctaaaccatagcacaaggcaaatgaagcattatgttgtctgagaacagtgaaactatagatgtcaagtaggaagtgttggaggatctgttatatttattttttctttactgagaatataattaaacttcacaaaagttgaggatcactgccactaattttggaccctcaactcagaacagatctaaataagacagaaaagaagaaaaccttattgtagaatcttgttgacatttctgtattacattcagagttccagcaaaatctttagagcgttaatacatctgtggggaatgtcaccttttttcaaataagaaagaacaggcatccatgtaacatttccttgaggcctccattcctctcccgattttaaaagaaattgtatttttaaaccacacttctcagtattgctatccaggtaatatgggtagaatttttttggcaatgtggggatgaagtcagaagtcctaaagattctttaaggttcggtgcctctatattcttatgcattttgacagagagtctataggaaggagaatgtcttcttttgtatgtgaaagcatccaatggcagcattagtgtggcgcttgtgacagtaatattggagctatatatttagctactctctatagcaaatagttgcactcgaacaaatctgtagagtttattttgggaatcttgaagatttcctaatgttgatgagaattgagtctgactttagaaacctcggggtataaattgttctgataattggtccaagttgaacctggagaaaatgctgatgtgttcactcttaagcagagtgattcatcatgtaaaccttatcatagcagctctggcagaagggagagaagtgatgtagggagtgagaaattaaaagtaactggaaatggtggttataacatgcacaagaaactttcaggtccttcaggaaaaggttgctgggtagccatattctttaccatttcaattaataagtgttttctgttctgtttatagaaagtgtcctttctttccatgcaacttgcttgaaattcccttgaccctcatccccattgttctatgcccatgggattattttttggctttcgtggcttcccagttaagtagcgttcagaaccatggccagtcctggttcagaactggctattctagtccctaaacagcagtaaaggcaagtgctgtaagattatgtttgtgttgaacatatttttgagaaagataattgagattctgcagtttcaaatattgtaaggaagtgtgtggcactaatttgacatgactattctcaatttagcaactaaaaaaccttaattggcttgttttccttataaatatgattttaatgctaattttagaaaatttagaacttgcacataaagaaaacaaggaaaatgagaatcatcagtaattcttccacttaaggataataattgttaacatttagtgtatgtccttctggtggttttttttctatacatattatataagttaataagcctgttgttgcaagtgcaagaaactcatttagaactggaataaacaaacaacaagaaagaatttttttattcactaaaggaaggatctgggtatagctgggtttttggggaaagtaatttgatctgaacaaaaggctacaagaagctaaacacaacaactagaagtaatgattatttagatacttaaggcactgggtaccttgtaattttaacaaggcagatatgccctggtggttaaatgtgggtgaatggatggggttgcatgaattcctcttttttgagtcctcacttagcttttcttctggaaattctctggcatgtgatatgtgtcaaaagacgtaatttgggtctcaatcaggacagcacaatgttctgaactctgtacttacccccaaaattcctgttatccattatgtccatctagacttctttgtctcctggttttgttttcactactgtgttgttttggcatccccaaactactgtgttgttttggcatccccaaactactgtgttgttttggcatccccaaactactgtgttgttttggcatccttgggaacgttgggagttgacatccttggcagagtattgagagtttcatgcttgactctgatgatggtgtctgtgatgcggtaccccttccaggtgtttttttgcagatagagggcatcaacagagggctgtagccaaaagaatcaatatgtgtgaaacatcccttggggacccagcaaattcttgggatgttaatttattagggggaatgcagtcttacgatatgcagatggcgcaattgggtgattaccgtttctgtgaacctatttcttctcaaagcctcatgaataccatgcaaacttggattaagtgaggaaaatggtatcatggaaggtgaaattcggaaaaagtcaaaatgtttagtttcatcattagtttagttacttagtttaggtcaccattgaggctgctaaaaactaaatgattgatttgaattttacttttctctctgatagtcttggaatattgaaataatattaataatatgcttaatataattacaattaatataattgggataattaataaaagaagcagcagaccaaaaaggctgtgggccaataattttttaaacatggaatttcatggaccaaacttactttactgctgtaccatcattgagactacccctttgagaatggcttagcagcgttttaaaaagaaagatacatatttacatcactgacagaaatcctcgttttaattttttaacccactgctttggcagaagttaggaaagaactacacagaataagttatagaatacaaggagtactacctttatgttctaaagaattctaagtatcttatagatatgacctgaatccatgtaacgtttttgtaatgtaaaccccaggtagattatttttctacatttttaagataaaaagctacggtacagatatttcttaaaaatgtctgagtaaactctagtttttatcaccacttgctggctgaaattgaacttactctgctcctaactaaggtagtttgataatattatgaaactcaggctcttaatgctgttgactctctatagctgaataataatatcatggcatattaaggataatttgtgataattgacagcttttcttgagtgggagcttattaatacttggatacctaaatatgtttaaaattatctattttaatgaatactacttggctgtttcagtttcttagctaatttgaaagagaaaaagtaactgtctaatttacttgtctatagcttgctaacatgtaaattgatggtaattttctggattggttggggtaaaggtatgttaaggcatgaagaaaatctaggtaacttgtacacatctctccaaaacttggattccattaaaaaaaaaggttgttcaatgcaattagtttggtgatacacttaacacatggaaattagctctactttaacctgttaaaatggaataataggagggtatatcaggactgttggttgcaaatggcagaaaatttagctcagattgctttaaaacaattttgcttttaatttaaattgtaattgtcaagtatgattgaaacatagctgacttcaggcatgggtggatctaggcattagaaacctacatctgccttgcttctgagttattacatgtttaatttattcttaggtagactcttcccttagagttgcaagatggccatctgtacttcatagcttttattgccattttagcctctcagcataatgattaatttcttagtagttctagcaaaaggctgacatttatttactctgtttcacctatatcaggtcaactgcccactcaaaaatgaattgctgtgtgtggcaagaagttgtgatattctcattgctcagacctgggtcatagggccttgtggattaaaccaaatggttatacaagtataaagatggttctccagaagaaaatgggatgctgtcattagaaaaagagcttaaaggtggttactaacagatgaccactacaatgtgtgtgtgtgtttgtgtgtatgtgtgtgtgttttaaacatttatatgtttataaaactttattcatttagttattctcatttcttttatttataaaggtgaaaatgaagtttgaggattttatatatatatttaagtgtgtttttagagtgttacagtggtctggtaattattattaataagaatgcactaccttatgtctacttagcctccctccatgcctcatgccccttcttcccttattcttgatatcctggaattgcacatcccaataaacattagcacataagctttgcctgagtttctactttctggggaatatgaatggaaaatgatatctatcagacttacttagggggctgtttcaaatgataaatacaccaccgtgacagtcctttgatacattgtatgcttcaagtttataaggatgagaaaaggtgtaacaccacgacattagacttagaaatagttgacctaagtttgatcctaactctgctacttactgtatgacattgagtaatttgctgaacctctctgagcctcattccttcatgtggtcaacaaagggtcagcatgataacatgggttctcagggaggactgcttggggtgcctgtgaatcattaggcaatttacatgcatctccaagcctcagttttctcatgtgtaaaatggagatagtaatacaatctacctaacaggtttgttttgaggattcaatgagattgtcattcatgcgaagcatttgtaaagtgccttatctattatcatctctgaaaaagagtaaaaagctgcctctttgaaagattgtgaagattagctgcattctctaggcagctgttggagccatttggtttaggtctgagcacctgagctattgtaaagcatgacataggtataaaatgatgtctttttctaggggaaacaaaactactgtgatatatttaatacataaattgtggaagttttaacaaccatgatatctacctacaaacttttgtctcacaatgaaaaacagaaatgaatacttaaaatgataactatgtaaaccagttgagaatagcacattaataacttaaaaatagttgtttctttttatactttggtttgaaagctgagattgtaccagattgtggactctgcaaagaagaaaatgtgaaatccagaagtcctcatttaacttgtttaagggaatttatatgtagacttgtcatgctcagcaggaattcttcattgtgatcactatttctattaaagcaatttttttggaagcctgcagggtggccacagtgggatgcttcctataccaaaaccaaaagggtacattcgcaaaatgccttttggtgaataatgaaccaaatttcaactaatttactttctgactatttcatatgccactgtgatttccgtgtcttctgaaatctaatacatttactgcctatattgttcatatagcaatctgatcgtgttttcctttaattcttttaaaaaatgagattaaccattagagtgtggcagctaacaaatgggcttagaaacaacacaaatgggtttgaagtcatatcacttagtagttgtgttatcttgaggaagtcccttaccttcttaggatgcattttccctgtctataagagtaatgtaagggaataataaaagtaactatttcatagacttgtgtaaaattaatgatataacaaatgcaaaacatttaacacatttcctgggatagcgtaaccattcaaaaatattagttattgcttattatagttttatccatagcatttcccctactatgtattatcttttcttctttttattttttatttttatgggtatataataggtatatatatttacggggtacatgagatattttgatacaggcagacagtgcataataatcacatcagggcaaatggggtatccatcacttcaagcatttattatttttttgtgttataaattccaattatactcttttagttatattaaaatgtacaataaataattattcattgtagtcaccctattgtgctatcaaatactaggccttatttattctaactatatttttgtacccattaaccatcccccaccccacctgctcccaccaactaccctttttagtctctggtaaccatccttctactctgtatctccatgagttcaattgttttaatgtttagtttccacaaataagtgaggacgtgcaaaatttgtctggcttatttcacttaacaaaatgtcctccagttccatccatcttattgcaaatgactggatctcattcttttttcatggctgaatagtactccattgtgtgtatatatcacatttcaaaaatccattcatctgttgatgctcacttaagttgtttccaaatcttggctagtatgaataatgctgcagtaaacatgcatgggagtacagatatctctttgatatactgatttcctttcttttgagcatatacctagcggtgggattgctggatcttatggtagttttgtttttggttttttgagaaacttccacgctattctccatagtggctatacattcccaccaacagtgtatgagcgttcccttttctccacatccttgccagcattcattattgcctgtcttttggataaaagccattttaactgggtgatatgatctcattgtagttttgatttgcatttctctgatgatcagtgatggtgagcaccttttcatgtacctgtttcttagttgtatgtcttattttaagaaagatctgttcagatcttttgcccattttaaactagattattagatttttcctattgagttgtttttaactccctatatattctggttattaattccttgtcagatgggtagtttacaaatactttcttccatcttttggttgtctcttcactttgttgattgttttctttgctgtgcagaagctttttaacttgatgtgatcctatttctccatttttgctttggttgtttgtgcttatggggtattacccaagaaacctttgcccagtccaatatcctggagtttccccaatgttttcttgtagtagcttcatagtttgaggttttaaatttaagtctttaatccattttgatttgatttttgtatatagtgagagataagggtctagttttatttttctgcatattaatatccagttttcctagcagcatttatcgaagaaactgtttttccccaatgtatgttcttggcacctctataaaaaatgagctcactgtagatgtatgagtttgtttctgggttctctatttattctgttccattggtttgtgtgtcatttttatggcagtactctgttgttttggttactgtaggtctatagtaaaatttgaagtcagataatgtgatgcctctagttttgttctttatgctaaggatggctttagctattctgggtcttttgtggttccatatagattgtaggatttttttttctatttctgtgaagaatgtcattggtattttgatagggattgcattgaatctgtagattgctttaggtagtatggacattttaacaatattgattcttctaattcatgaacatggaatatctttccattttgttatgtcttcaatttcgtgcatcaatgttttatagttttcattgtagagatctttcactttcttggctaagtctgttcttaagtatcttattttatttgtaatgattataaatggaattactttcttgatttctttttcagattgttcactgctggcatgtagaaatgctactgatttttgtgtacttgatattgtgtcatgcaacttaactgaatttattagttctaatagctttttggtggaatctttaggtttttccaaatataaggttatattatttgcaaacaaggttaatttgagttccttctttccaaattgaatgccctttatttcttctcttgtttgattgctcttgctaggacttctagtactgtgttgaataactggtgaaagtgggcatccttgtcttgttttagatcttagaggaaagactttcagttttttgccattcagcatgatactaggtgtaggtctgttcttctattaatattatattgaggtatgttccttctgtaaccagattttagagggtttttatcatgaaagaatattgatttttatcaaatgctttttcagcatcaattgaaatgatcgtatggtttttgtccttcattctgttgatatgatgtatcacgttaattgatttgcatatattgaactattcttgcatccctgggataaatttcacttggtcatgatgaatgaactttttaatgtgtgttgaatttggtttgctagtattttgttgagaatttttgcatcagtgttcattaaggatattggcctgtagttttccttttctgatttgcctttggttttggtatcagggtaatataagtctcatagaatgagtttggaagtagtctttcctcctctatttttagaaatgttttgggtaggtaaaacagagatatagaccaatggaacagaacagagccctcagaaataataccacacatctacaactatctgatctttgataaacctgacaaaaacaagcaatggggaaaggattccctatttaacaaatggtgctgggaaaattggctagccatatgtagaaagctgaaactggatcccttccttacaccttatacaaaaattaattcaagatggattaaaaacttaaatattagacctaaaaccataaaaaccctagaagaaaacctaggcaataccattcaggacataagcatgggcaaggacttcatgtctaaaacaccaaaagcaatggcaacaaaagccaaaattgacaaatgggatgtaattaaactaaagagcttctgcacagcaaaagaaactaccatcagagtgaacaggcaacctacagaatgggagaaaatttttgcaatctactcatctgacaaagggctaatatccagaatctacaaagaactcaaacaaatttacaagaaaaaaacaaccccatcaaaaagtgggcgaaggatctgaacagacccttctcaaaagaagacatttatgcagccaacaggcacatgaaaaaatgctcatcatcactggccctcagagaaatgcaaatcaaaaccacaatgagataccatctcacaccagttagaatggcgatcattaaaaagtcaggaaacaacaggtgctggagaggatgtggagaaataggaacacttttacactgttggtgggactgtaaactggttcaaccattgtggaagacagtgtggggattcctcagggatctagaactagaaataccatttgacccagccatcccattactgggtatatacccaaaggattataaatcatgctgctataaagacacatgcacacgtatgtttattgcggcactattcgtaatagcaaagacttggaaccaacccaaatgtccatgaatgatagactggattaagaaaatgtggcacatatacaccatggaatactatgcagccataaaaaatgatgagttcatgtcctttgtagggacatggatgaagctggaaaccatcattctcagcaaactgttgcagggacagaaaaccaaacaccacatgttctcactcacaggtgggaattgaacaatgagaacccttggacacaggaaggggaacatcacacactggggcctgttgtggggttgggggaggggggagggatagcattaggagatatacctaatgtaaatgacgagttaatgggtatagcacaccaacatggcacatgtatacatatgtaacaaacctgcccgttgtgcacatgtaccctaggacttaaagtattgaaaaaaaaaaaaaaagaaatggtttggataggattggcattagttcttctttaaattcagctgtgaaaccattggtcccaggcttttctatgctaggagaccgtttattatggctttaatctaattacttgttgttagtctattcaggttttgagtcttttcttggttcaatcttggtaagttgaatgtgtctaagatttgtccatttcttctaagtttctcagtttattggcatatagttgctcgtagtagtttgtaatgatcctttgaatttctgtggtatcagttgtaatgtctgcctattcatctctgatttcatttatttgggttctctctttttttctcttaggctaaaggtttgtcatttttgtttatcttttcaaacaaccaggtttttgtttcatggatcttttgtattgcttttttaaaatttcatttattcatgctttgatctttattatttttcttcctttactaattttgggtttggttttattttgcttttctataatagttctttaagatgcattgttcggttttttgtttgaagtttttctactttttaaattatcgctttgaataaactttctaccccaatctttctctcccttctctttatgccaataacccttagctttgcccttttaggctgttttctagatctcacaggtgtgtttcattcttttttcttttgtctcctctgactgtgtattttctttttttttttttttttgagacggagtctcgttctgtcgcccaggcgggagtgctgtggcgcgatctccgctcactgcaagctccgccttccgggttcacgccattctcctgcctcagcctcccgagtagctgggactacaggcgcccgccactgcgcccggctaattttttgtatttttagtagagatggggtttcactgtggtctcgatctcctgacctcgtgatccgcccgcctcggcctcccaaagtgctgggattacaggcgtgagccaccgcgcccggccgactgtgtattttcaaatagcctgtctgcgagctcactaattcttctgcttaagtctgctgttgagagactctgatgcatccttcggtatgtcagttgaatttttcagctccagaatttccacttgatttttaaaaattatttcaatctctttgttaaagttatctgataggattctgaattccttctctgtgttatcttgaatttcattgagcttccgcaaaacagctattgggaattctctgtctgaaaggtcatatgtctctgttacttgggattggtcattggtaccttatttggtttgtttggtgaggtcatgttttcctagatagtcttgatgcttgtatatatttgtcaatgtctgagcattgaagagttaggtatttattgtagtctttacagtctgggcttgtttgtacctgtcttgggaaagcttttcaagcattcaaagggaattgattgttgtgatctatgactttggatatgatatcgctgcagccatgtctgcgttaggcagcaccataagcccagtaatgctgtgactcttacagacttgcaggtttaccacctttgtggttgtgttaagatctgagagaattccctggattaccaggcagagactcttgttctcttctcttactttcctctgaacagaagaagtctctctttccatttgagctacctggagttgggggaggtgtgactcaagtacccctgtggtcattactactgggattatactgggtcagactcgaagtcagcacagcattggatctcacccaaggcccacagtgaccattgtttggctaccaccaatgttcagacaaggtccaagggctcttcagtcaccatgtggtgaatccagccaggcttgcgtccttcccttcagggcagtgagctgagggcaggtacagaaatgccatgcaggaaccagggcctggagccgggaactttaggaatctatttggtactctattctgctgctgctgagctggcacccaagctgcaaagcaaagtcctttacactctttcttcccctttcctgatgcagaaggagcctctctgcatggcagccactgccccgtgcctggctactgctgatgttcagtcaaggctcaagctggctattcagtcagcttatggtgaatgctgccaggcctgggtttctaacttcagggaagtgggctcttctctggcccagggcaggtccagaaatgctgtctaagagcgaaggcctggaattggggatcataggagcctgcttggtactctgctccactgtggctgagctggtgcccaagctgcaagacaaagtcaccttcattcttccctctcctttcatccagcaggcacttctccccatggccaccacagctgggaatgcactgggtcacacctgaagccagcatagctctggatctcactcaaggtccatggcaagtacttcctgggtacccttgatgtttattcaaagcccaaggtctcttagtcagcaggtgatgaatcttgccaagactgggtccttactttcaaagcaggaggttccctttagcccagggtatgtctaaaaatgtcacctgggagctagggcctggaattggggccttaagactctgcctagtatcttaacctactgtggctaagctggtatccaagttggaagacaaagtcctctttactcttccctctactctcctcaagcagaaggaaggagtttctcccagagctgcactgcttggagttgggggagaggtggtgcaagcactttcttggcttcccaagctggtgtctcgctaagtcatatgcaccccaagtctcttggctctgagcccagtacagcaccagtagaaacttccaggagttgcaaactagtttatgacacacgattttggaattttaatcccccaaaattgatatactggttgctcaggtgcctatatgtaataaataagacaacctatgaaaggggttaggcatggtacctagagaggaagacctggaggtagtgttacatccttcttccattccattttgcagaagtcaccactgagttgctgtctaatgagtagtgattcatgttttgctaaattgagaatgccagactacagagtaatgctctgtggaggagagccgagcagggatatgtagtatctatgctgttttttaggcaggagaccaatttatttttttctgttagaggtggggacaaacctacatcacatctttagaaatggacaaaaggttgattatctgactctagacttctcccttctagaagctaattctatggagtacgtatggacacaaagaagggaacagacacaggggcctacgtgaagtggagggagggaggaaggtgaggatcaaaaaactacctattgggtactattcttattacctaggtggcagataatctgtacaccaaacccctgtgacacacaatttacctatatagcaaacctgcacatgtacgcctatatctaaaataaaagttaaaaaaaattaaagctagttctgatttagggatctttgatgttgaatgttgatgaaaagtgatttatatttgtgattgctagtttcagaaccactacgatgaaaaaagtgactaaacttttggtaatgtgaacacactactccttagaagtattgtccagactccaaattctgcctgtcatttcttcattttcatgccctcctgattgcctaaaatagttagacttcccatttcatgattggaaaggcattgcaaatatttttacattaaagtcctggaactgtagattattttctaccagggatattaagaaatttcaggccaggtgcagtggctcatgcctgtaatcccagcactttggagggccgaggagcggggatcacaaggttgggagatcgagaccatcctgactaacacggtgaaaccccgtctctactaaaaatacaaaaaattagccgggcattgtggtgggtgcctgtagtcccagctactcaggaggctgaggcaggagaatggtgtgaacccgggaggcggagcttgcagtgagctgagttagcgccactgcactccagcctgggcaatagtgtgagactctgtctcaaaaaaaaaaaaaatttctaatcacaaagtaaaacatattcattgtaccttgtatcagtatgtactcaattaccttattttaatgttctgcatacatttatatttagcagatttttttctggtattggtttatgtgctaatttacttatttatttaaagaataaattacttagttaatatttattttccctacatacatgtaaactctgtaagatcagagatctttttgtcagaggctgaagataaagcctgttaagccaattaagagcatagacagtgctcagtaaacatttgctgaatggaatacatgagtgaattgtaaacactttggaatttatagaaaagtgaacataagaaaacagaagccctagaaataaaccatataacactgaaagtgtacctgtgtatttaaatatgcctgtatatgtagaagtccttgctttgtaccgtagtgcatgactgtaaaaaaaagactttgcaaactgaaattatgcaaaacaatcctaataatcaatgaaaacagttactattgctctttgacctttaaaaatttttaaatcactacagtctctcttgttgttagctataaaggtatagggaaatggaaaaaggtaaaactaatatttattcagtacacagtaatttaaaacattagaaatattgatattaaaattgtttcattgtacagtcttatcaggagtagtttgaatagtgcttgccttcttcctgttgtacaacttatgatacagagcatgcattttttttcaatgcctagacaaactgtcatgctctctaaatgtggatcagcttacattttatcctgtgtgctttccatgtcaagaaatgtctcctaaaactccttgaatgtgaagtttttagccagtatcactttctctaggacatcatcatccttttcattacaatcactttccttgtttatgttgattaattcaccttcactaagttcctctaactgcatatacagagtctttcaatggtgaatggcagcatcgtttacattccatgattagctacgtcgtctccatttacgtttgatacaaattttacttccaatagtattaatttttgtttgtgtacattgccttcattcttgttgtccagttctgtctttgattatccatgtcacttgcatttatctttgggagacaagaaggcaacacagctacacactttgctgtctgtgtgtgaactgaacaacaaacacgcagtgatcaatcactgacatattttaaagaaacaccccatgattggtcaatgatcattatgcacacatgttagttacgtagtgatttatggactgaagagctagctgcaaagtttgtactttatgaaattactattaatataccatgttaactgaaatttgaactgtattgttagggactatgttatttaatctaaattgtggtgactgaaatgtacacatatcagactgagcaccgtgagggctgcctcaattcctagctttattttatagaaatatatatttcttgtttctttactaaaatgggatcatttaatgtgtattatttttatttttaattttatatggtatacatgtcaaaaaagtccagctattttgacttcatattttatgattgagtggtatttcattgtgtagttgtaccatactttatttaaccaatcttcctttatggatgtttaggatttttctgttttctcagttataaacaatgctagaatgatcacctctgtcactaaacctttgagataactcttatttatttagaatgaatgtatttctagtacaagaattgttggctcacaggatatatacactatttaaaaattttcatgtcccaccagaaattttcatgtccttcaagcatttccctttagagagatgtttccatttaggctcctaccagtaacataaatcaagaagtgctgggtgcatgattcccaaacccttgcccacgttgggattatcatttttttttttatttttgacatttaattaattaattaattaattaatttatagacagggtcttgctttgtcacccaggctggagtgcaatggcatgatctcggctcactgcaacctctgtctcccaggttcaagccattttcctgcctcaccctcttgagtagctgggaatacaggcacacgccaccacgcctggctaattttttgtatttttttagtagaaacagggtttcaccatgttggccaggctggtctcgaactcctgacctcaggtgatccacccgcctcggcctcccaaagtgttgggatcgcaggtgtaagccaccgcgccctgccattttttgacattttaataggtgaaacacattttattttaatgattagtttcgatttttaattaggttgaatatttttcatgggtttatttgtactaaataaattttgatctatggaattttattctgtcctgtattataatagttttcagatggtagggatttttggttttattgggtcatttgtgtacatatatttctacaaatttatatatgcatgtgtgtatgtgtgtctatccataataaatatatttgtgtgtacttgaactgcattcacatgtatataacattgttggttttacccagggattttgaggagtatttgtgggccttaaatttgtaacatgaccatcaatttccaactgcttttctttctctctctctctttcttttcttcttcttcttctttcttctttcgtcgtcttcttcttcttcttttttttttttttgaaagggagtaacccatgacctgggggaaattctagttaatttttcattgcatgattttcaggagatagggtcaaaaggagctagtagggcattcaattatgtgcttgagtgtgttggaaaatgttttttttttttttctctctccctcaagtgtacaatattttacttgggcttgtttttcaagtgcattgaagtgtgactaaacatttttgggtactaccattctgtaaagaagagggcccatcttgttaaatattccttcatcaactttgcagttagccagttattggcagggagaagcctgcgagggcatgagctttaggcattggacagagggagggtgggtgggaggcggggacttgggggatctcaggattggggtactttgttgtccctcccactgctgtatgaaaaagtgactggttcaagctggcttttgtcttataattttggatgagtcataagtggagaaggaggggaagtgagtggttagacctcagctcatctgagggctaaaggttctttgtgacacatcacacagaattggagtgctgtccttctggagagtggtggagaaccaagatacagttcagaaccaaaggaatagagaagggctttgatttctttttggctttagattggggatttgggaggcttagcaggaaagatgtccactgaaaatgtggaagggaagcccagtaaccttggggagagaggaagagcccggagctccactttcctcagggttgtccagccaatgtttaaccacagtattttcacttctgcagtctctcctgctgcagaacgcatccgattcatcttgggagaggaggatgacagcccagctccccctcagctcttcacggaactggatgagctgctggccgtggatgggcaggagatggagtggaaggaaacagccaggtgaggcatagctgactgtatgtagtactgacccagggaaacaagggcagggcaagatgcttgatcctggagtgccgttctttagccttagcactttgaatggccaatgggcatgatgttggctgggataaggagtaaataattctatttcttcttttcttttttgttgacatgaatgcagggcacctcttatttcactattggggcattgtttcattgatccatgttgctataattttggcttttataaggaattagaaataaagctcaatttatatactatttaatagtaaaatattttagagagataataaactcaggtacccaaaaatgacagccaagagatatgtttccacagtgtccacatgccaagatctcttgtgagattttgtgtgacttattactcattccctgtcaagaggtgggttttggccaggtgcagtggcttgtgcctgtaatcacagaattttagtaggccgaggcaggtggattgcctgagcctagggttcaagaccagcctgggcaacataatgggaccccatctctacaaaaaaaaaaagaaaaaaaaatcagccgggcatggtggtgcatgcctgtggtcccagctactcaggaggctgaagtaggaggctcacttgagcctgtgaggtcgaggctgcagtgatctctgatcatgttactgcacttcaatctgggtgacagattgaaaccctgcctcaaaaaattaaatgaaataaaaaagagattattaaaacaatgaggaaagttgctcttatggtagtccccccaaggttatccacagtttagcttttcatggtttcggttactcactgtacagtacagtaagatattttgagagagttgccacacttatataactgttattacagtatattgttgtatttattctattttattattaattattgttgttagtcccttactgtgcctaatttacaaattaaactttattacgttttatatacaggaaaaaaacatagtatacatagggtttagtactatccatgccttcaggaattcactgggggtcttggaatgtatcccctgtgaataaggggactactgtatttcaagtataaacctgtaatcttttaaatatccagctgaaagtagaaggttcatctgagtttggagtttagaggcccgagtttactttgactctgttgcctcttagtgacaagacactcgatttcctagagctttggtctcattatcaataaagagtggataataatgcctattacatattatatatgtatggtatataaaacatatatgtaaatatagtatacaatgtatttataatgtcacatatatacatacatgtgtatatgtatatgtatgaaaatgctttgtaaattgttaagcattacacaaatacctggggtttcattaatctcataacagagcttttcttttacatacagattcagagatattctccaggtgaatcttctgtgacataaggcaattatgtaatacaaagactttgattataatgcagttgttggtctctcattgtcatcattatgtgctgattccaatgtatttcactttcataaacaagataatgttaagataaacctcttatagtctgtaatttaattccaatcaattcaactcaaccagtgttatttgaatgaatagtttatgtcaggcactgttttaggtaccatgaatatagcagtgagcaaatgaggatcttacatagatctctatcttattaaaaggtttgaagtaagtttaatataataccttacaatatgagaataagggaaaccaaatcattatcccagctttgagtttaagaaaaacaaagcaaagatagatgaaagtcttcttctgtggttatagatggaaaaagtatttatggctgctattttttctacatagacttagaaagaaattctagagtcagaaagaaaatatttttaaaaatcgctttaatcaattagagcagatgagctataaaggagcaataagccaatagcctttccctttatggatgaagagtcttttaagagttagaggaataatttttattttctgaggcatactttaaaatttcttacatcataccacttgtaatcaagtgtttatgaagttaattggattttttgtagtttagttacttaggcttatgctttgtaggcttatggatttatttttatttccacaattttaagtaatattgaatgtctttagccctttgggatttttaatactggagaagcttcataaattaatttatttgataatgggggagaagtttttattcctcaccaagagtttctaggtagcttagtcttgcagaaaaaactgctttaaaaatgtttagaactgatggagaatttcttatctttcataacttaaacaatgcccagaaaaaaagtaattcggctttactcctagccccaacagtagtattagggaaagagacctaatttttaaatactttattttcaatttactgggtaattctctttctaatagacatctacagtgggtgtgattgtttaactcttctgtttgatagctacttaatattttcttcttctaattaaaaaagctttcataacacatttccactcctcatctgtaatactttcttttgaagcttttcattctttgctcttttggggcttcctcccaggatacatcaactgtttcttgttcccctctctcagaaccaataacctgtatagaaaaaaatcctctgtaaagtaaaattttagttcctaaaacatcctccaaaagaaggcttccaaagcaaaagctttttactagtgaatctgtttcattctttcttttccttctttctgatagaaaaatacagtgtgagaattgtcctggtgcagcctgaagtgttgggagattttggtctagtcttggctttgctgctcactagctgtttcactttgagcaagtcatgtagtctttctgagcttgaatttcttttttatcagatgaaggtcgtattgagttgcctcctccctaacattatatatatttcatagctctaaaatttaattcctgtgtgtatactgctacactcagctaagactactttgactttcttattttcatcttgaagttctttgtgagttgttatcatagagtataattcaggtgtagttttctgtttttcatttcagtcaaatgcagaccatacgttattttacataattcctggtcccagaaaggtagagagattatagttcattgtataggtaattcaacattgaatgataggagcataggattttcactcaagatttttaaagattaagatggttttgaatactttaccatccttagagacgttatttccttgggagcacgtgtgccattttgctgatgtagtctgtccccaagacaccctactgctggagaggaagagtgttgggagtgtatcgtgtgtcacgtccacgctgtataacttctctttatagggcttaccgtaattgctgtcgattaattcattatgtatgtgatattattgttttcatatggtctccctcattacattaatttatctgcagagagactaccatgtctgttcactatcatatttctagttcctggcagtgtctgattcataataggctcttaataaacatttgtttaatgtgtgattggttgagaactgattgccttcgacacaactgttctgaatataatactttcttagaaatattaattgaccaaatcagggttctgtataattattctctttctgactgataaaaagctatggaatgaaagacccaaggtacccagaatgccattgataaagcttagaaggggacctatgtttaaagtttcaaactatttcattaatatattgatgatatctgcatttataaaagcacggatataattccttatttaattggaatcaactaatcggagggctaataggattctcaaaattgacatgtctaaaactgaacttcagatctactcttcctaaagatttcctcttctcaatagacaattccattcttttagttcttgagccagaaacattggagtcttccttgattcctgtctttctctacacccaatatctgaccaattggtaaattctgttttacctttaaagatattcacatattcagagatttcactacatctcacattcagtactactacaactctagttcatcccatcatttctcactgagattgctgcagatggctcctaattagttgatctcttttcatctgctcttacttcctttatgaattatctgccatcatctctttgaccttgtcttccttttcatttcctctgcttcactctgcttgagcctcactggccagtcatgctaatctgtcaggaactttggacttgttgttccctctgtctgaaatgttctgtcttccctgaacccccacagttatctgcgtggcccatgtcctcatctccttcaggtctttattcaaatattacctgcttagtggttgtcctatctataattgaaaccttcccccaatgcttcctatccctcatctttcattatttttgtccttagcacctgtcatcatttagcataccatatatcttgttattgtctcttcccaatagaattaaagctctgtgagggcagaaattttcagttgttttgccactgtattcctagtgcctgaaactacctggcacacaggtcatgctcaacaaagactggttaatagaatcaatgaatagagaaatagaaccttgattcttggtttgctgctccacctacattctttggagaggcgtggagtgaatatgcttctggaaatattcagcttttcagtaacctttactatctgggacataccctgctgtcagaatgtttttgcagtaatttttgactcccatttgtgatgtctagtttccagatatgatagttttttccccccattaaaagccctcagacctaccagactaataaaagtttaatgcttagaaggaatccattttacatatgaagatgtgacatgaatctttttctggccaacttataaattgataatattttgattttctgtgaaagtcgcaattgatagcctattttatttcatagagagctaactctccagacttctccagctccatgtaggttctgttataaatctacagcccacagaactcaatatcatccttctttctcttttaagacctatacttttcagttggctaatgatttcttacatattattgagatggctaatgatttcctacacattattgagatgaggaaatctgtaggcagagtagatctgaagttcagtttaggatattcttgtaggatcaggataataatgcatcagcattattatggctgtagtactacttcaggaatttcaggttggccctgtgcctaaaaaaatgagaattgtttcaataatagggggagatgtccccttttaagtcatggaaagcacagtagttatactatgaacaagattaagtatttatttatatgaagtttaaagtaactctcaactctatcaccatcccttttacgtcctttacctgttcttccctttcctaaaagttagaactttgaattttcagtggttcttccaaaatagagcacaagttgaatatggtaaaaagggtagacttatcagacctgaaaaatcgtttggaattggtgaagaagcctgtgcttccattaagaatgtctaggtgactaggtgtcagctaatgggttcataaagcaaactggtaaaagaataattcatgatccaagtttgatgatggcccaaagtcaggagaaagggactttttttttccctgcccaaattctttattcatttgagtagggatatctctgcaaaaatgattattagctgtcagtttctcttcagtgaattttcagatggacagtgctggacttaaccactgttgtatgaatgtttgttaaagataactcccccagcgtaattcaaactgtgctgccaaacttgggtataaaggaaagccatcacaagtttcaacaaacacaagccaacaaaggaaaggggtattgatgttttacttccaactggacaccacaaatgtacacccacttgtgtttctgcttggcagatttacttcaggtaaatctgaagtacctgatttaagggcatggccattaagcaccaacatgtgcacttatactgtgggtttgggcaaagactgctctctcccagtctacactgacttctctgtcttttctctactgaattactttgggaaattctatttcaggccaagttaatttttctgtaagaaaaagactcaaggaatttaatcatctatgtaatcatatatagttatgtccatgtagttgtgtacaataactttaatagtggatctagaattttaagaattctccttaaaaacctcatttttcccaggtacacactaacgttggcttcttttagggtgataaggcacttgttagttagcaagacatttatcatcatttcaatagttgtacgtagttggaatttatttagtgtaaaggtcatgtctgttttccactgtacaactgatatgttattaagttagaggtctttttttttcttaattatatttaatcatatgattggaaagttgcaaaattcagtgattcccagtgggtcttttttttcttcaacaaacgaatgaaatgttgtttgtttggcagtcactgaaaatgtcttaaactgcaaagtattttatcattattcttctaagaccttggaataaacttcacctaataaacccctcctccaaggttaaaacggttttgtaattgcaagtatttaaaaagcctgcttctgaaacaaatttttctgtaacatgtcaagtactgaagcaaaaagaaagtgggaaacttattgcaaatatgtagttattcatagttattatgaaggggagatagtggcttttagtatactattgcaaatatgtagttattcatagttattatgaaggggagatagtggcttttagtatactctacagtaaaaagtctgttttttttttttaaacgtaattgcatggttctaaagcacctttgcagattcattggcacttgaatagggtgaactttggtacttttgccttagccttttctttaatgggctctgatttgaactgagtagttttcagtttttgtttttattttccaaatccaaatttgtccttgatatgcgaggaggctagacaaagcatgtgccatttctggaatgaaactacctgaaaatgatctgtttaaatgggaaagccagtagtttatgtccaaatgcatttgttggaagtataatcagttccttaaacaattagagcaatacattttaaagcaatttaataggcatttttccagagttctccttatgctgtaagctgtgctgtaatatgacatcatcaaaatattcaatatttactgaacttaaagtaaaataaatgctaaactgagctatgagataatatttatcccttataaatatagattttaagaaactggctagttttgagaatttatatttccattcctttatggttaaatcttgacctaaagagctggtgtaatccagaagggtgagtaatactatttcataaatccaccctagtttggatttatgttttgcaaatgcactttttaaatgtattcaaagtcatatttaagtctaaccaggttgcctacaatataaactatggagaggaataaataaaagatggaccacaaagaactgcagtggttttgcttctttttctttttagataaaatcttattaaacttatattatttggacagttgaggattgtctgagcctattcaggctgctataacaaaataccatagactgggtagcttacagacaacagaaatttagttcttatagttctggaggctgggaggtccaagatcaagacattgtcagattcagtgtctggtgagagcctgctttctcacacatggcaccatatcattgtgtctttacgtggtggaaggggctagatagctgtctggggactcttttataaagtcattaatccatctaatcacctcccaaagggcccatctccttataccattcccttgggggataggatttcaatatatgaattttgtggggacatagacattcagaccatagagaggatgatggcagaaaagaactactgtatataagtgaggcttagtttttttttaagtaatagaattggcagtacaggctgttggcagctgatagaagtgggggctcatttaggaaagataagaaggaagtaaaggccttgtaaaacactcccctttacagggcttctagctgccctgtgtcattcatcttgggcttaaattctatgaccaaatattctatccctcagaaaataagcatactcttaggaattcaagagaaatcaaggagtcattacactctttatagatagatgacataattctagataactctgacttgctttcatatatgatgatatcttcctttttctagagtcttatcttgagcaataaattatagcatcatatataaatatgattcatatgcctattaccaacaaacatgcttagcgattctatgagcaagcatgaaaagatgatatacctaaagttaaccaatgtaacattctccatcaaaaataaattagtttcaaaataactctaatcaccttattaccttttacagttttggttaaacccatagaattctttgagtgtgatataaaattgtcgttttttttctcccagttccttttatttctgtggtctaacttgaatcaaagtgaagaaatactaatttagtcacacacacacacacacacacacacacacacacacacacactagaagtctttcattctgttttggaatgtgtcacagctacttttgtagaaataaaccaagtccagttctgaagtttcagaacttctttggtgctatcgttgactttttaaccatgaggtaaacagtaaaaatctcccttcctgcatttttggggaggatacagggagaagaaggagggtcttagaattgtgggtaaggttgatacaaggttaccactaacatgggagttgcctggctgtgagagccttcctgagaggcacatggaggggaaagtctttagatacggctaaaatacttctgaaacatatgggtgctgggcttgattaacattctaaattttctttgacattgtgggctgatcgcttgatctattttcactcctggtctactaatgtgtttttttttcccctcctctgggggtggtaagaggtctataaataataccctatgtagagcttcctctgatctctgccctttgttctcatctttagtgagttaggtgagcgtttagctttctctaggaaaacatttttcaatcattaagcctttgggtgaagaatgtagaaaaacaatttttattccatctttatctctttcaatatctctcagaaggtttaaagtgaaagaagcctttttgttagtatcatgatgaatagcaaaacgatgttgctttcccattttcctttaacagtgtaggaagtgtctgtgtaatatgtgggatataaagtctgtcaaatgtgttttgctctcatttccattaaggttttttattgctatatattgctaagttatcaaaatgtctaggagtcttagaaagcagaagctagaaaagagggttgttccatcgctaaggttaataggatatctcatattatcagaataatctgttgttcaccgagcttgtgtgtatttaaacacacatggaaccagacttgaagggtaaagcttttaaaatcacaataagaggggaatatgcatcagctgagatatgtatattaaaggaagacacaacaaaacgtgccggtcttccttaagcatcaataaaacgaaattttacattcatcttgccacttcacgcatcatgttttttatgtctgcgataaatattggttcatcactgatatttcaccttatttaaacttgcctcatgaaatcacaacagaatcctcacagtggtggctatttttatgcactgtaggctgtacccacatggagaattttgaaatgcatatttttctaccttattaaaaaatttagttaaataattggtcttaaggatctcatggttacatataggcagatataaaaccaaggatgctttggcttctcttgcttggcttttttcttctctaacttcaggggaaggagcagtctagtgcttctctttgggtgtgtttatgaagattatgtaattaatgatctaataagctattaatactccacaaaaagagacattttggaagtgctggaaggggtgaagatggaggggttgagactgctatttctagaggaagttagaacacttttaattgctcttcactaatctcatcttcctaggtggatcaagtttgaagaaaaagtggaacagggtggggaaagatggagcaagccccatgtggccacattgtcccttcatagtttatttgagctgaggacatgtatggagaaaggatccatcatgcttgatcgggaggcttcttctctcccacagttggtgggtaagtatgctgtttgaattttatcctatttttttcggctttccctagccacatgtctccatcaaggcagatgactagtactgtaagcagagttaaatgttttataacatttattctctctttttgcattataacattagtatgatttattgcaagaaaatctgaaaaatacacaaatattaagaaaatagaaaactatcttccataacatcttcctctggtcattgttggcattttggaatatttccttctagctttgcttctcaatcctttccctatgtttttgattttttttattttattttattattattattatttttgagacagagtctcactctgttgcccaggctggagtgcagtggcgcgatctcagctcactgcaacctctgcctcctgggttcaagcgattctcctgcttcagcctcccgagtagctgggattacaggtacctgccacttgtaccttatgtacttcagatgcatgaaaagtgtggggcttctttgcaaatctaactaacaagctctccgaaaaagaaccaagtatatgtacatcagccagacatatgcctcacttgacagctaatctatttcttccaacacaaatgctgcagcattcatattatctataatgtaaagaaatggatgtcatagataagccttttgtctacagatatacaaagaaactttgcagtaagtctaaaattagacaagaatgttacactggtcaccttctgcaggtctttgatccacatcttcttccccataatcccagggtaggcacactgcagaccccttggaaaagtgcagccatccctacaggtccagtgctcacctggttatggaatttcctaggaataagaagtggagcccctgcacttctttttaagaaaaaacatgatctttggcacacctagatctgaaggataatacggcagtttaggccaagctactgatagaaaatggaaacaatggctccagtttggaatgcagtggtgtgtgcccaaggtgttcagcatgatgagttagcattcaacgcacaaagtactaactacaaaggaagccaaagctgccctgcaccatgaggttcagtgactttgatggtggtgatacaaatgatgcttgacaccaatgtgacctgactcaatcacttacccgtaatgtcttgctggatccctgtcccacccagcctttcttcacatgcagctaaaggggcttgacttctgcctacaatcaaccctaacccaggaactagactacttctcttcttacagatgatttaagtcctactttacagatgatgaaactgaggtccagagaaactcagtgcaagtctaagatcaaagaattctagaaatctagtgtctggacttccagtccaatataaccaaggatggatgaataaagagactccatttataatgttaatcttatgctaataagtgaaagtgaatgtaaatctgtgcatacagaatgaaaaataactaaaaaggaaaagtatcgctgggcgtggtggctcatgcctgtaatcccagcacttttggaggccgaggtgggtggatcatttgaggtcaggagttcgagaccagtctggccaacatggtgaaaccccactcctgcctctactaaaaatacaagtggagaagggagaggacttatgtaaagatgctggatggacagaaataattattttatacatttattcagcagtagtacatgggcttctacaatgtgccagacactgttctaggccctgaaatcagggtttgtaaatctaccactttgtaaatgagacaaggtacatgtcaacataggtacaaatctgcatttgtagttagaaaataatggaggaaacaattttatatagcatttttcatattgaacaaggcaggtgaagctgaaaatggaaatctgatatatgagaagagatcttggattatggtacccagggagatcggaacccatctacaaaaacagaagcaagcagaaagaattattttctgggccatctgttccattgtcttttttcattcattaaaagctgcaagaaagattgttatccagaaaagtataatgattggcaacaatcaatccagtttttgagtgaaaattgtaatttctgcattctcagaccttaagaactaacctggagcaaagatgtcaaaaattacacaagttgaaaataaatcaaatgtgcataaatgtagggcaaactggagaagaaaatcatgacttggcagagtataggcagtctaggaggagaataagggtcaccaggaagagtcccttattaaaaaaaacacaattttttaccatagatgatcattactgcctaaattttccccacttagggtttcatgccactgtgctcagggtttgtcctctattaaaatatacttactctatgggaagatgtcatatattaattcccgtgagatacagagtgatgttgaagaaggaatgctggatttaatgttggggagttttaattaaagtctagccctattagcatgtatgaccatgggcaaggccagttactgaactcttttggagtcttcattccctcatctataaaaagaagatgaaggtggacctttcagggttgttatgagcattaaataagatcatcagatgtatttgctgtctacttacatgtctatcccagtatgaatagtttatccagatatttctgcatgtcacctagcagagtgtagagaaatgagtcagatagagagacactcagtgacttcatgaacgggagacaagattccaaatggtatggtagacagagctggaaacagttgaacagcatccctgctgtgcttggaactgatcagcaagggtgatgaaagttaaaagttgaattacacacttggatgttgctgtaaaactgtctttgggatcttcatcaccaggaagagccatcttaaggagcttctggtcttcagcaactaactgaccgttttcatgttgtagaagagagagtaccagattatactggaacgtctttagcgaatggccaaagagagaaggttttggtacttactacatataagagaggttagccaagcattttgtggtttctcttcaatttttcgttactttttattatcagctgtgaactttttctctaacctccatgcatttactttaaaaattgtcattacatgttaaaatttgacactactatgtcactttgaggtatcatcactcactaatatgtttgctctgcagttcctggggcaagcagtcagagagccagtgctgtcattctggagctgataatacagaaaaacagttcagggacaaataacacatcataagtaaaacaaagaggaggaaaagggccagatttccagaagtggggagaagagcatgtttgaaagagtgtcactagctaaaaaacatcttaatcctctgaactaatcaaaaccctacagaggataaaacatgaacgaaacagagcccttatttcatctaaatgacagacaatggcacagtaacttgagaagttatagtcgttatttgttttttaaaaaatccttttgtagcagtgggtgaggtggagttgttttgtcccaaatcatgctgatacttctgagttgagaattatgcacagctaaatcttaagatgcatctccccccgcaccccaattttatatcaacaaatgagaagaaaaagaaataatagcaagcatgattatatcaaacaaacaatagctgcttttcatcttcctttgcagtccacctgctacccctcaccagcctgcctctgagaggcatctcaccctgcaggctcaaagacagcgccacaccatgtgagggccctgcaccatgatgcgcgactgtttaagcaggtgttacttctcacacttacataaaaaattcagcctatttttgattcttctcaggatttctacttgattttttcacgaagaaccccttctgaatgttaatagaaaaatttatctttaaagtattataaaggataaaacatcattttcacagattattttaatagctttattattagtatcctcattgtaattctacgtttaaagagtgtcattcacgtatgaagccgagtctatgggaattttcctccccttttaagttaaaaaaattataagccatttcaggtattttaccatgatgggaagtgaattgggaaaatgtagctctatttttggagtctcatttttatatttaaaggcattcctgagctgtgcatgttggcagatgtattggtcctattgtttcttactttttataacttttacattttcaaaatggcaataactttttttctagtcacaaaactaatgcatgttcatttttaaataacccggaacatattacagagcttttgtaattcctagtcaatactgcaacattgtcatcagaaatggaattgcccattgaatacctttcacatcatgggggttgattcaataagaaacatatattatcttagttaatcttgaagttgaatatttatttatatatttttggccctttatatttcttttaggaatgtttgtgatctttgtccattcttctgtcacatggccatcattctcttggtttgcaaaagctctgcgtatatcaattatttgtttctctagagcttagtttttaaataaagaaaaatattgtgtgacatggggaaagatctaaacttagagtcagaaaacctggttttatatgggagttttgcctctaatcagtccatgtctgtgggcaagtcagtctgtggccctgtgttctcatctgcatagcaagaggttgaacttgatgctccatgaagttcctttcagctctgctatcatctagtgttggcacattctctcccaattggtagtgtctgtgggattttgaacaccgaaggcttaatttcagtgtagctgtgaaatgttactgcccccactttcctttgaaggattttgtcgtttatacttaaagagatccctataatgttggccgttttaatggaaacttaatgaagggcataaagccacacagatgttttaacctgttctaactggtgatttccaggcattagtaacagaggactggctgtgcatacataaagattggtttgagatttcaagggagggtgagaatagagggaggccctgccaggaagggtagataagaaacactttagtctacaaccctgaaattagagtaggagtttgataacactcatagcagacatggtgggactgtttgtttgtttttctggttcttctgtaaaatggactttccactttaaaaggacttaaaggaaaagtagaggggttgtgttttgtaggcacctaattatttactgtggaagagaggtttaattgtaattacaggatcaattctgatagttttgctgagtggggtttgtgtagtttaaaatactcagagctaaaaaccactctaaaccaaaacatttctatgggagaaactcttcctgccttgcccagactccctaccaagtggtcccatgttatgtgacagttatggcacctctgtgaggcatgtgatggaaaatcctggattcagcctctgcttggcttccaaacagttgatagtacattgtgtaaattgccagtttctagctataggctgtgaggccaattctgtgagtgtttagaagatggacttttgagaaattcagtcatgcccaagcaaaacccgttgaacatctgtaacttctctttacaaagaagtgggaatccttgggagatgctgttatcctaccagtacccatcaattttcttgccggcttttggaaaagaatagttattgttcgtttctttacatttatatactaaagtttgcccaagtggaaaatatcagtgtgtgctagatgcatccatgtaccagaaagggagccatgggatccattactcacattctgtgcagaggacaaaaggtctacttgcataccttgagacagactcctaccaatgcatatcttgcacagattctgtaatgttttgtcctcagccccattctggatggagataaatgttggcctgtcatgtagatgtagagtagaatgtaccaggcttcatttatgctatactgctgacatgctgacttgtgagaaagagggtttcttattttctattggcataagaacttaccttccagcagagtgacctatgagcaatttctatgaaacacagtcatctttctggttaaaatcatactaaaaaaagagtaatagaaactttactttttttttggtagtaagactaagatattaaagtttcattaaaaatttcagtcagtttatactttaaaatgcccaatggaaatatactggaaagtcttcagttggatctgaacaataagaataagcctcctttcttagaaaagactacaacataattttgtagtttaatctttctttcattggattaactggtgttcagatgacctgatattaaatactgtttcccttgactgtattctattattaagtacgtataacatcacagaagaatttgggaaaatagattttaaaaatcaacaatctcattacttttaattttctatactctttttaagtttttaaatatcatttatatttctgatatacatttgctatgagtacatgaactttttgactcttccccttttaattgaaaaatataaattactgacttattgtgttacaggataatctgacttatgtgaatacatcatatctgggcctgaaaaaacataaaatgaatactctaatatttgtatctctctcatcaatgcccatatctgtgtaccctgtgtctttatcttttacataaaatgggaaattagaaatttagaaaacaatatcttgctattaaatttgagggtgacatccataaagttagagtaaaaaaataactttgtggtcttgtgactgagttttgttttttgcttttgtttttgtaccagagatgattgttgaccatcagattgagacaggcctattgaaacctgaacttaaggataaggtgacctatactttgctccggaagcaccggcatcaaaccaagaaatccaaccttcggtccctggctgacattgggaagacagtctccagtgcaagtaggatgtttaccaaccctgataatggtaatgcagaggccagctggctgctgctttctcttacttatttcactcacctttacaccgtctcctgtcatctttgttttaacccttctccatattttttcttttcttgagttcatatgccatagtcatttcatattgacatttttaatccagttggacaggtttgcagtcttgctggaaagatttccacaattgttgtaggctgctaatgccacggtgacttgcttactccatatacatctattctgattgatggaggtggtttagtagtaactctatgatgaaacaattgaatattatagatgagtcagcagattcgtagattattgagtacctctgtgaatatgttttccagcatgtttgccagaattaggaggagaatagtaagatatgataaatgccttgaaatctcctatcacaaagtgtttgcttagtatgtgaaatggtgtccagtctatataaatgatgacttcatcaaactaagcctccatattattttttacctctaataaaaccaatctgctttctgatataggataatgatagatccaagaataattattcaagatgggatattaaccccattatttaacaataagtaaggcactgtatcctatctgtagtttattgatttaccagagtttcctgtagagtgtctatcttttgtatcatggcgtttgtttcaaataaatttcatgattgggagcaatctgagaagggagaggtcagtttccatgaggtatggaaaatgaaggtatgaaggaaagaactactaagcattggctgataggattaggtctatcctcccatcccacccccaggctttttagtgttaagagagatgaggccgggcgcggtggctcatgcctgtaatcccagaactttgggaggccgaggcgggtggatcacgaggtcaggagatggagaccatcctggctaacatggcgaaaccccatctctactaaaaaattacagaaaattacctgggtgtggtggcacgcacctttgtcccagctacttgggagggtgaggccagagaaaagcttaaacccgggagggggaggttgcagtgagccaagatcacgccactgcactccagcctgggctacagagcgagactccgtctgaaaaaaaaaaaaaaagagagagagagatgagtagataagggagattctaattcattgccctcagctgcactttcagaataacataaaaccggttgtcatggaaaaaggtggagtaactgaattgcaactcagccactgcatttctggaaatgagttttctcttagtattaaaggtaactgttggctggaaaaacactacaagcagattttctgtggtatattttttaggcaaaactggttatgtgcaaataatttaaataaaatgctttttattaacaaaaatcacaaaagagaattgaatctgcagtatttctactacagtttgatggttctactgttacctagaatattgctgctgatgggaaatattttggtttttatgtctcccctggctttttttttgttgttttagttgtgtttttggaaagaggggttacttaatggctagaaagttatagaatgagtagtttattataactgatgtcacaaatattttatttaacaatttatatttttgaaattatggcaattaaagttgaagctactcttttatttcttatttaataatccactttcttatgtaagatgaaatcccaatatttgctgatttaattcgtttatcatggggttgggggaagtataaagaagtgaaaaagtgcattgttttcaaatactgctatattttcaaaaagaagtggaatgaatatggcatgcaggaggctttctaccaatatgatgagcttcatttccatggaactgcaggcagagtagaaattaggaacagatggatcttggcggccagaatcttgtgctttaggagaaagtatttggatatggaatacaactaatgagttaatatcgctcgccattcaatctttcatcctatctgtagatctctgtacttgagagaaaagttgaaattgcctttgccatccatcttttcacttgtgaaatgttatatatgctgggcagaaagcaaataggaagggtatgcagttcttttccagctcttcagctgatcagcttacactctgaagtgtggaatatgattagacctttttaaacatgttgttatttgccttaatgctacctaacttcttttaaatatccagaggcaagatttagctttgagagatcctttagcaatgaattttgtatgccttcaaggtacattcttataaatcatcaaatggcaaatttttggctttctagaggtgctcgttattaactggaaagtttgcgtagttacctttatatcttagggtttaattacttaatatctttaaaaaactatgaaatgttctcttagaataaatttctaaacaaacgttcttagaataaatttctaactaaaatttctaataaatggaatgttcttagtttaaatttctatataaaaattatagaattactgtaggtagaattattcctacagttttaatagaccacaatctttcagtctgttgtagttggagctagattctaatatctccatgtaaagcttagataaatttgtatacctttgtctttaatcataggctacaaaatagattcagtgacactgccagctttagttatagctagcaacaatgtaataaataactgaaatttatagagataacttcaaagttgtgaattttttcatttcatggtagtgtactggagtcagctctaatctgctcgggagagccagttgatatcagggatttgcaagctggttgttaaatacagctactattaaaaattaagttatataaacatacaatttaataattatattaaaacaaagataacgaatactgaaaatttattgctttctgcctgtttcactacattttactgtagtctgtgctcttaaggttatttgtatctactgtgtctgtatggtggtagaaatactgttaaatagtgtgccgttgtgcatctcttccctcagtgactatactggtaccttgaaatgggctgttatggtagtatttaccccatagaaaccagcaaatgctataaatcagggcttgatttttaaatttttttttttgaccatttgtctctaggcttaaagaagtgatggagaaaatgctaataatgtagattacatttaaaagtgtaaagtgtctataactgttaaaatgaatagcagaaaaaaattgaagaactttttttcagtaatcaaaaactgttatctgatttaggaaaagagtcagccacatcactgacaaatggatgaagtctgacatattcaatcttcattgtttcacttttgtcttattggttaacatacataataatattaatcaacaaatgtcacaaatatttgttggatatttgatggatgttggaactatactcatttgccagctagcataaccatatgctagctactgatgcaagagtttggccaagatcaactaaagtattgtatgagaatcaactaactatatgcaatttacaatacaatattgtatattttattattatttatataatgtgtgctacatattgttgtaggacttctccttagttcagttaaagacggggttcttgtcacacgaccacgaaaaattaggcttgcacacaatttgaagagtgagaaaaatggaatttattgagcaaaaaggaaaaaaagggaaacagggactctcagcagagcgagtcctggtagtacaggcttcctgccttgcagattgaatcccaggtacacccaggaggaggagcggcccggcttctccaccctgagaacagagggaaattcccaaggctccaccccagtgcgcactcctcccagtgcacaggccggtcagagtttctccaggaacccctctatacttggttgtgacaatatcctttataacagtaaaaatcaatgcatacacatactcacgcacgcacacgttcatgtataaatatggttctttcccctggtaaccggttttcaaacatttactggcacatccactaccagcacactactgtctttattcctaaagactaactctcgtcttttagcatcctggtatggcttggggttcaagacgattttatgtttttaaaaaggagcaaaaaacattttttatctgtaataaatcagggaacagtgaggcaagctttcaaaatgctaattattgtgaaattgctacttgtttgagacatgtgtaaattctatgggcatgcctgccaggtactaaattttaggcaaatgctatcatttctcagtagattaactgaggcatttctataatgttgcatgaagaaattaatgaggttttaggtaattctggtgttggatttttccttacctactttttatttatcactattgttttaggttgaactatatgaaattgccaaaggtaaaattaagttgtcagcaatttcatatgattctacctaataatttggtctgagatacttagctaataattctgtattatttagtgtattatgaaaaagtaatgtttaagcctggaaacattgcttggtagtatttaaaaaataaacatgtatttagtttgctttttattagaaagtaaaagtaaagttttttcttaattggtattcattcaataaatatttagtaagatgtttatgacaagcataacaactgcattttaaaaagttgtggtttataagatgatcagacttttttttaaatgtaccatttaaatgagtactttttatatgtattgtcttatcccaaagcttgcaaaaaatcattgagacctgactttaaggaccaaaaccaatgaggagcctgaatttgagtattcacctttttctacctttgtagaaagttgggtaaagccatcatcgacctgtccctgattttttcctaacttcttcattttttgtccccagattaccataaagatcagttccttgccttccaaggtctgggagtatagatgccctttgctgagaattggctttagtaatctaattggatctagactatggatttcattttcccttaatctaattttacgacctcactttgtattagtgaaaagtttctcttttttcaataaaaaattggaaagataatttagtagttgctcttgatgtctgtgaaagagagataatgaaaagtaagaagaaatgtataaaatgtttagagtggtaactggcacatagtaatcactccacaaatgttagtaaattttatacaatatgtttaagcacaattagggaagaaaaatcttatattgaataggagtggtttctggaatgatacttgctctgtagcttactatttggaaagaaactagcagatatagtgctgatttattccctctgccctttgttaagtgataccaatagtctttcattagcaatgggaggtgaggaagacctttctcatcatagccctcttacgtaataatttgttcccttcattggttttatcttttgctaaatgggtgtcagggggggtcctaaatcacactggaaatccacgacttggtaaagttgtcccatcagggagataaggagctggagacagtggcagctccaaggagagcggctggctcctaggcttcttgctgctttccccatgccttctcctggtgcccgtggtctcctccatatttgtaggcaccccgggcctgctcctgatagaacctctgcatcttatcttcaatttaccaccattttcctcttttttaattcaaatatgagaaatgtaatccacttgctcccattatgggttgccactacttactcctgaatctggactcctctgtttaaggttatctgccaggtgggatgccacttcctagctgtctcccatattgctggtttgatataaacacacacacctttaggtatttttaaaagcatagtctattgctgttacctacagtaacagataggtggtttgcaatgcagaacaaacaatggaaagaaatcaatttttatgttaatagtaattttaggctccagtgaaatataagtgatattagttgggctcttgctgcattggatctgatttgagattaggcccattcagactatttggtttgatattagatccagatgccttgacactggcttattttggatctggctgggaccaccgccaggtctggtagctttctcgttccctttagaaattcttcactttttgcctgcactttggattccagcttgcccatttgtctcaggctgggttgttctgctttccaggccatccccccaactgccccatacccttgaattcagacatggtcccttaatcaatgtgtaaggcagatatttccctaacctgcttctgaagccggccatcatgcttctctagttctcagataggtcagttgacatcttgcaactctcaggcccacatcacctgaaggttagaatcctcttcctatgtgcctttctgcatacaattaactctttcccaaaagcaacagcatacatccacctgttttgttcaggactctcattttccgttcattttcatagcacagatgaatgtcctgaccagaacccaaataacgatcaagctctttcccacctgagaataaatgaaccgatctatggaaagttgctagcaaagtgcctgaatgaaatcctcttccttaataacagtaattattatggctattgttattatggtatttctaactcattcatcaggcaccattcttattttcttattttccttttctttctccaggcagatgactgattttccaaatgcataatgttcagatctttaaataaacaacacatttttctccaagggtcaatctctctcagtatttgctgacctattccactctttatagcaatgaagagttgggcttaggagataaaactcaagtgggtctttagttgtttgacattgaaggcctactttgtaatcttctttttaaagacatgggaccatcatttccagaggtttcattcaattctttggcaaatgtttagtagcattgtggttatgagcaatttacataatctctttgagcctcagtttttatatctgtaaaataagggtagtgatgtcttattctgtgcatataaccaggaataaatgagatacctttgtgaaaattattaaataagcagaatgtgagataccattgtgctttggtgcattcatactgccataacaaaatagcttagattgggtaatttaaaacaatagaaatttattgctcacaattctggaggctggcaagtccaagatctaggtaccagcaaatttactgactggtgagagccctttcctcatagatggtgcgttctatggatcctcgcaaggtggaaggggcaaacattccttcaagcctttcaggagagcaggaatcccattcctgagggtggagctctcttgacttaatcactttacaaaggcttcaccttttaatactattgcattggagattaggcttcaacagaagaattttgggggggatacaaacattcagatcctagcacactgtaaggaacaattattatccagaaatattttagggggaaaatttagtgactttcagctttaaaattgaggacagaacttcaattcactaccattattttgcattttattattttctgtttctctccattttttgcctactacttcatttatacgaaaatattcttggagttttatttttaaaatagtgctactttcattatctactttgcagatgccaaataatacataatgagttgtcactcatgggctttctagtatttttaaatttagagtataaagattgatcattatgtctaagtaatgacagttttagctatcaagaaataatatgtgtacagcaagatgttaccatgtaataaacatatttttaaattttactagttgtcagtctgttttatacatctagggtctgtgagagagtaaaagaactgaaatgattctctttgcgtttatgctaccacatgtgagtgcttttttcttcattcccctttcctggagaagtcatgtatttcaaggacactgaactggtttgctgctgtcaaccctgagtaaatcttcttccaaggcttggtttccttaatagagccacgcttgcaaagttttttgtattcccaagccccatgttgctctgggagcaatcgaagtgtaggtgcagatctgggaccacatcctgctccctgtgaaagagatataggagagggaaggacagggaaaagtaaggagagaagggtaagcaagatagagacataaaatatgagcaccatgggttcatttaaaggaggggataaattaaggtcttccaagaatgactaagcatgcctcattctactcaactcctgtatccatagaaatacaaaggacaaaaaggagatctttctaggtttgtgaacccaatttcttaaaaaccacactttgaatttaaagtaggccaggatttctgtctttagtgttttccaacactcttcaagatgttgaacaaagaaaatgtcattccattaactatattagtagtagaaataagaataatgcctcacattattatggtagctctaatgtatatatcatttcagatgaaaaacctgaaagtcagaaatataaataacttgtctaagcatagtaaatggaggaacccagtgtgcttaataatcatatgctaattcaaccacaaggggatgagcttcctcaatcataatttatttcccacacatcacccggtccaggtctcatatgtaataatgtgatggtgaagggctctggaggccattctacatctaagcaggaaaacacaccaaacatggcagacagatgattgtctttattggctttccaaatggagatttctaggcaacatgtttcatgtgtttaggtgaaatgctggtataatcttgggttaaatttcttgtctaaatagcagtgccgagtgcataggaagcattcaatgactatttgaacatatgatgttgcaatcccaaaagagtcctaaaacttcaccatgaataaaatttattttcttcttaataggattgttttaaaaaaagcattttttctggagatattgtgtgtgtgtgtgtgtgtgtgtgtgtgtgtgtgtgtgtgtatctatttgcttgattcaaaaagagacaccttcacatgaacagatttaggattgatggttttggacaagttgattctcaaggggaatgtgggtcatgtaaaacaatattcctcacaacatctttttctacagtctaaatattggataccatcactcaaaagccttcggagctatatctttcctcatcagattgtggtaatataaaccaatttctaccttgtttatacctgaagtcaggcaaaagtgatgtaaagagaatatgtaagataatagcaaggctaagctgtttattttgtagctcaagtgtaaaagaggtatggtgaaagcattgtgtagacaaggcatacataatatatcattaccatggtataattacagaaagttctgctctagctttgggaacgacttctcaaaatttgatatttggagttaaatttgtgaagtgaaaaaaagcaacatgaaagggttacagagtttatatctcctcctgcacagaagtacacagagggtccaacaaatcaaaatgtagacatttgccaatgtaagtaatggatgctgtgcaagtctcagctttcatgagggtaagctgccagatggctccagtcaggctttgctaaaacacaggtgccgagtctctctgggcagttccattttcatgcctgtctttggagccaggttctttgctggcgagtgccaggcttcattccactgtccccttgatggtgaggctctgcctcaatggaggctgtatacgcaaaaagaaatttccagctttagttcccaacaatacactgacaggttgaggggagtagaggagagagaagctgctggggaacgttagttatcagcatgagttttggagaagctgctgacttcctctactcacgttagaagcaagccatggtatcagtgataaaatttgggtacctacatacacattagaagctaaaggaatatgaattctcattctaaagaaattggaagctaaaggacatgtcttcttttgaagaagtttcctttgtattatcagcttctgtcagttctcactgatctggcatttcactgggtccttgcttgggcctagataaatgtttgccagttgtttagcctaattcatttaatttagctaagcctgcaggaatattggctctttaagcagatcacttagttgtcaaaagaaataggaggcaaaacttggccagtatgataatatacatttctaaatgtctccctcttaacaaaagcaatttgggaacaatctcaacccattcatttctctttttcatttttcttagtgcaataaaaagttgcaaagaacttcaattatgggaaacaattaaaaattcagattgcaaagagaagacatcagatttgcctcaaacaggtgctggcacagatggcctgctcacaagtcctggctttatttacagcttttaaacacagacagataaattgacaaaaatgtttctcgattttataatgtgccgaatgcccaaatttggctataaacttatattaatttgtaaatgattcactttaaaccttgacctcccaagtcatcagtagccttaaaaagaccatttgtctcccctgttgtttgcatacttatgtgaatagattatctcatatttgctgttggttggatatgccttgtttactgccttgatcatttaatgatgatctttattaagtcaaattgcatgtagtctgatggctagatatttccaacctcgttgtgattccttaaaggataattatgccgtctctattttactagccttggagcatgacatttaataggaatagcaaaataaatgacatggagcccaaatgaaactatcttcaggaagaagttgatggtgttgtttcctccaggtgataaaatgtatctggagaaaccatactgtatatgtagcctgcaacattatttaatctttgctgtggtctaagatttggcataggtgcaccaaaggttaaaatgttaaaattaaaagtgagtattaaagggcaccagaaaatgaggactaacatacatccttaaattggcttatattaaggtattaatttatccctaccccagtcttatgtttctgaagggctgaaaaacagaggaaattgagatccagctctatattcatcaaggaaaatatttcagaagtgaaagtatgaaatgttgctttctccatttgtgcataagatccatagacctatctattgagtaggtcataagaaagctgcttactaatacgacaccctgccccctgtgctttacaaagctgtgtgtaacttcgctctgtgtgtgcttatgtggttcataattattaacaatcttgatcttacatcctgagattagtgtttattatgtaaatctttcttcttctgaatataatttatgttttgtgtattagaactgcagggtggatcatccattggtatttggggaactataatgattgaatgtaatttttttagactttttcattctttgtggggattcatttcatctaagggtgcagggcatgggagggagtgtgtgtctttgtaatgtgtcattgttctcctttaacccgcttgtgtgatttgctttagcatttttttcttcttaattaatgcttccatcctcatccttgctgtggctgctcatgtgtcctcctcctcctcctgtcttctgcttctgacactaaagtgcgcagcccgcttgagaactcagtgccctgcctagcaacccgcaccttggatgatgacccccgagtgcggcgcactcccagcgtgggatggctaagtaagtcaatggctggggaaagggcaaggaaggtggcggtggtcgggagagggagggcaggaagatcgggctcatggttactgagtggagggaaacctcaagaatgcctgaaagtgtaagatgtaaatattcctaaagtcgtaattgctgacttatttcttctactgtcaaagagtacagtaatgaagaacttcctgggtgatctgctgtcctgaatccaagttgaggacattgtaaggcagtggaaggattgtgagactaaggggtggggctggcactggcagccctccctccatgggacacttctctgaacctcagtttcctcatggtgatgctgaaccttcttacttcagaggactgggaggaaggtcactggagatgaggtctctgaaggtggtttgaaagcattcaagtgctaagtaagaggaagagcttactaagttaataatgttaaatacctcaaatacctactatatgccagaaagacagaatgggctatggacaacaaaaaaggggaataagatagaatctttactttttaaaaatttagagcttggtaaagtgacaagatttatgtacctaaaaccaaaagagaacatgcacaggaagctacatgcactttcccacaggtttctaaactgagtatatgtgatataatttttttaaagtagagtattaagagatgaataaggtgattccctgtccttggggggtttcctttctaatgaaggagacaggacataaatagataacaattgtataaaatgataagtgaaatgaatgaaaatacatacacacacacacgattgtgagaacatacccttggtctgggagtggcagtaatagaaagggcttttagagcaggtgttttctgagctaaatcttaaaggaaaagtatgagtttgatatatccataaaatagaaacttaataattttccttgaataataaaagttacaaatactaaatactttatgttatgctatttaattttctgaagaatcttgtgaagtggctattgttattacccacatttgacagatgaagaaattagaaaggttaagtaacttgcctagatcacacaggtcataagtgtgtagggcaggacttgagcttcatcatatggtagtttcaactataattttatgggtgatgccttactgaagttaaagtataggaaacttacatggtcagattgcccaaaagatctgctaatcccacaatgaagctctaacactcacatgattctctctgcaagaatcaagcatttcttctaataaattcttttactacttaatgatgcctcttggggaaaaaaatttcaggtaaaaagtttgggccttggagtataaagtcaggcaggaatgggtctgaatcctggatctaccactcctggcttcctgactttgggcaaattactcttttaccgtaaacctgggtgtttcaaccaactataaaactgagttaatcttaccaacataggattgttgtgagaattaaattagaaatatctaaagtatctagtgtagtgctcagcactcagttaatccagcattactgctgatagcaaagttcttatagaaattgctcaagaaattctagctgtttttatttttttaagtttcatttattccatgtcagacatccagacattgaagtatttttgtcgataaagtgtcaaggaaattgaccaaagtgttcagtttgcggatgatatggaaatatggcagctatttggaaatcaacttgagaccaaaccctggaccaatccttctgagaaacacattttagtaatgagggaggattcttctcattgtctctttatgtgatgtaatctctccctaaataatcagctttgatgtataatcaccttccctagggcttctaatacttactgtatccattcagtaaatgaaatagacacctagtgaataactaaggtgtgcaaagtagtgttaaatactgctggttttacctacctattcaacctcacttttgtctcttctcaatataaactctaatcagcttgtctcttttcttttgtcctatatcatggaaaatcctacctccatgtttttgttgataaactctacccttccaggaatgccttttttttttttttttttggtacagtcttgctctgtttcccaggctagagtgcagtggcttgatctcggcttactgcaacctctgcctcctgagttcaagcaattctcctgcctcagcctcccaagtggctgggattacaggcgcccaccaccactcccagctaatttttgtatttttagtagagacgggttttcgccatgttggccaggctggtttcgaactcctgacctcaggtgatccacccgcctcggcctcccaaagctctgggattacagatgtaagccaccacacatggcccaggaatgccttttccagtatacctatccaaaactattcagtaggacctgaatgaagttccatctcctttgtaaaatagttcttataaacacagatcttttcaagtcttaaaattccataactcctattttctgtgcctcacaatggaagatttaccatatattgtcttacgttgttctctgatgtttcattgtctttattttttcatttcaactatctacataaaaaaaagccttctctagggtctgtatctcatgcttttgtgtctcctctggtgcaggtacttgaaacaagggtgttgtacaatacacatttgttgacccttgatactccatcatttcattaaaagcaaccaacagcccagttttcactagggcccatcttggtcaccagaaaccgttaaccaaaagtgaatatggtttacttgtaaaaactatttcaccatatttctgcatatcctggtctgatgaatttgattatcaatttattctaattgttaacatggacttaaaaaactgccagaatattagctaaaaacaaatttgtaacaaggttttttaaagtttatctttaaagattttagcaagatattttcaggcctaatgtaactagaagttactaactacctttaaaagcttcatttaaagttccttttaaggagtaagctctcatcatttttacattgtgtgcttcttatcttcattgtcacctgaggcagatgtgagcctagagctcttatccatttcaaatgctgccaaggtattgaattagaatttggaacaaaaccaaaaatgatttcctcttacagatctcaccggcaggcctgaaaccagcctgggctggggaaaacaaagagaagctacttttcaggacaagttaatacccacctaaatgccttgccattattagagcataagaacataccctatcttgctagatccagaatggcttttcactcttagcgcttatctgtgaattcagtttgacatctagcagccagcatcatctgagcccttagaaaacacttgtgtccttttgcatttactggcagtcgaaatcagctgcttcagactctcaggtctgaacttcaaagaagaaaaggaggttcagagtttttttctgtcatcttatgcacattcctggcatctgccttcaccttgctttgtattttacctgtctagtttgtccatctactgggcagggacctggtccagttcagtgttttgctttgcaagtacttacccagtgtttaatgttattattatcatcccaagtattagtagttgtaatactgttttctttgttttttttttttatttaatgaaaccacagtggtataactgtagattcttgtttcatcctacaatcaggctacacagttaacattagaatttaaataactgaattgtaagtggacatttttttgcttttaaaaatttttctttgagcatttctggaattaaacaattcaaaatcttttaacttttggagagtttactgactaaattaaaattacataatttttctctggctctagggtcttcataaagttttacttctttaggaaaatggtgaacccagagaattcactttaacaagttcaattcaacagctgttcaccaagcttccactcttctagttatatggtccaatcagagggaaggagataagggaaactcacaaataacaatcatttgagagaagctatggtaagtgccaccaggagggtagggggcagactggtttgtctacagtgtgtacaacagtagcatttattatactctctgcaaatactaattagaagaatgaatggtggggtataaacagagaattgggaaaagaattcttgggagagacagacttttcaatggaccttatatatttccgtaaatagagattgtagtaagagcagggtgagacattgaaagatcatgctaggctagagaaaagtaaaaaagcaaccatgttgttgagaaagtataaataagagtttgtatgaggtagagtgagttgatacattaaattagcagaaagggcatgggaagaagatgtgtggagctagagtggcaaaataattgggccattttgtggaaggtctatgaaagtttttagtacggagatagcatggttagaactttatgttagggaaattaacctgtcagtcattctttgagtgggaatcagttaggagatgatttcagtagaccagtgctggaaaaaggatttaagctaggattgcgactgtggaagtggaaaggaggggataatgcaagaaatgttataggaatggtgttgtctagactcaataactgactgaatgttaggggaggaagagaaaggagtccaggatgcctcaggaggtagcaaccaggaagatcataggaaaccattcatgggcacaggtgctgggtttacagaagcatgacagttaagatttctgctcccatcatacgtgttgtgaccatctttgaagatatgtttcactagcagatttttaggttacccatcatgggccaagactcttctagattcctgctttgttatcacactcttagcttggtgtttttttctcctaaactttcttttgaggtggagaacaaccaccacatcacaactctctttattgcccagtgaattttgagcattcttatcttgattccaagcatctcactttccatccctctgtttttttcagatgcagacttgtttttgaatggaaatattatttgggtcacttattgtaccatttccacgtatatttttggcctttaaaatctaaagcaattccaagtacaactttaaaaattccttcactgtagcttttcatagtcacaattttcaaaagattgtaagaaataaaatctttcagcaacctgatgtctatgttcagactttttagttaacgtaagacattcagaaattgtatgtggtatgcaagaatgagttacaacattcttaagatacaggcagttctaaccactttttaataaaggaattagttactgtttatcctgaatttatgaaaaacatatcataaattatttccttgatatctaatattacatttacaatggactaaaatatattatgctgactttagacaactataaatagagaaaatcaagatgagagaataaaaacgtagaaattctgttatatttcagaatactggggacttggaggagatttcaagaggcacatatttggaaaaacgttggcagtctgctaaaattgtaaaacagttttttttttttcctaataagattttgggatttgtgaggattcagacttgtgcttgacaaaatggtgatatgtgtgatatatttataatcagactctcctgctcatcaccaaagctgtctgttttccaaaccttcctgatccttaccatctttctcccttctttcggacttggaaccttagcgtcaactttgattaatgcaactttgattatacctccagtataccactaaacctgttaaatgttacctccatattgttgcttgcctcagtctcctttccagtctgactttccttgcttttgttcatgtccttatttccttttgcttagtctgatccagtagcttgttttctggggtcagtggttatagttgggcatatggaaacgcatcttacactttgttccagttgaccttatcatacctggctgataagttacctcctcatgtggaagtgttcagtggtacctgagaggatctcaggcaacctccaaatgcttgagtctggcattcaaggcctaacccatagtgaactaaagttgattaagtagtatttcacacatctttctgtatttgcctttatctatactacatttcagcagtcacttcccattactagaatttgctggacgcttagtgcctttatcctgaatgatttttccacttggaatattcttcttcctcctgaaactttctgttaaaatcttgaccatccttcaaggcccacattctccttgaaggcttcttaacttgaggtgctctttactgaccttgaactctgatccttttctgagactcctcacatgacatttatctcattctactttgcactataatgtatgagtacatgtcttattccctttactagctatcaatttcttaagggcaggaatgtgtctgattcatttaggtatcctttattgcagggattgacaaactgtggcctatgtacaaaatccagcttgccacctggttttgtaaataaagttttgttggaataaagccatgctcattagtttatattgttgtctatatagctgctttcatgctacaatgacggagtagtggcggagatcatgtagcctacaaaacctgaaatatttactacctgtcattaaaacattttctgacccttatactgtagtcctgattctcaaagtaggaactgaagagccctaagtgtccctgagaccctttcaaagggattgaaaggtcctaggattttcatcatgtaattcaaccaaaactacatatatatacatatatacacgtatatatatatacatatacacgtatatatatacatatatacgtgtgtatatatatatacgtttgtgtatatatatatacatacacatatatacctgtatatatacacacacacacacacacacacacacacacacacacatatatatgtgtgtatatatattttttgagacggagtctcgctctgtcacccaggctggagtgcagtggcgcgatatcggctcactgcaagctctgcctctcgggttcacgccattctcctgcctcagcctcccaagtagctgggactacgggcacccgccaccatgcctggctaatttttttgttatttttagtagagacggggtttcactgtgttagccaggatggtcttgatctcctgacctcgtgatccacccgcctcagcctcccatagtgctgggattacaggcataagccactgcatctggcctcctaaaatatattttaacaggttgaacacagaagcagacaagaaaatccaattgtgtgtcatttaatcatatatatatatatatttaaaatatatatatgtttaaaatatatatacatatatttaaatgtattttattatttatttttgagttggagtctcacttactctgtcacccaggctggagtgcagtggtgcgatctgtctcactgcaacctccacttcttgggttcaagcgattctcctgcctcagtctcccaagtagctgggactacatatgtgcgccaccatgcccagctaatttttgtgtttttagtagagacggggttttgccatgttgccgaggctggtctcgaactcctggtgtcaagttatccacctgcctcagcctcccaaagtcctgggattacaggcgtgagcacctcacctggcctcatttggttgtatattaaagagatttgtaaaaatgtgaaacagtgcctttctttttatgaaattttttgtttctgaaagtatagttgtttttcataagatatacgacttatgttaacacgcaatggtttattgttaaagtgaattaatgaataaatatttaaaaatttttagttttaattcctaatgtaacacgtattgatagatatgacccaaataaacagaccctcttaatatttaattgtgtaaaggtgttctgagaccaaaaagtttgataactgctacttctttgtgtctggcagaatgccttatacatagcagtaaatcaatatatgctgaatgaatgaatgaacaatagaaccagatggttcaaatcaggaaataaatgaagtgtggtggtaataattgaaagtattgaaagggaaggttaagagtcattgagaaatgatatctactatgtgtttgtgactgtgattcctctttgttctcccagagaacattgatgagggatagtggagtaggaatggttttgttggggtgagaggaagagcaggtcttcctgactttctgtctttgctggtttcatgacaagtcatgaagaatgggctagattttgctatagtgtgagctagccccaaacatctgtgtggcctaacaacacagaagtttctttcttactcatgctactatatgtgtaatgtggatcttcaggggtctctgctcatcattgttagttaggatcaggctaatagaagccttctctcatctgtgtttccacagtcaccgtagcagtaagcaagggtcatggtgactcacaagctgcctcgtaaagttctgcacagaaataatacatcatgtttgtgtatatttcatttgacatagtgagtcatgtattgtattagtccattttcatggtgctgataaagacatacccaaaactgggaagaagaagaggtttaattagacttacagtttcatgtggctgggaacgcctcagaatcatggcgggaggtgaaaggcacttcttatatggtaagagaaaatgaggaataagcaaaagcagaaacccctgataaacccatcagatctcgtaagacttattcagtatcaggagaatagcacaggagagaccagtccccatgattcaattacctccccctgggtacctcccacaacacatgggaattctgggagatacaattcaagttgagatttgggtggggacacagccaaatcataccatgtgtccacatctcactttgaagaatgattatgctaccatgtgccctgaaggtggagattcagaaatatttggtgggcagcactaatgactaccacccagtcacaaaaggaattataacttgactttggagtgtgctcttcttggcaaggctgagagcaatgtgaagttatggaaggccactgtgcagaaaatctcctgcatactcttacaatggaggatgagggcttttcacataatgagggagggttgccagttcaaggtctactgaagaactggtgagactgtggttttacaggagacttctgaagtatactacattaatttgaaactgatagacagtctttcatgcaaatatacagtaaagcactcttattagaccaaacaatgtctggatttaatgattggagacagctcaagcgctaaatacttgaattcgtttgtctgtgcacatgtgagtgagagagacagaaggaaaagcaaatgcagtattccagctacagatatcaatttcaaagttaataatgaaatttctttttggcagcaaactgtcgaattttactttgatgaaaattgctggcaaaatcttcagaaacgaggcttttctttccatggtaagctgaatatttattgtgtttagacttgtcctggtaattcagatctcatttctactcctcttaatgcatcctccacctcaatagatcctcattcatccccttgtcaggccaaaaagtccctgtcatcttagacttcttcttgcccttcaccctctgtacccttcagtaaccatactcttctgccattttacttctgatttattcccacccttccttgactattacaactgctctaattcaggtttttatcatcatctcttgtgggaccacttgaatatcctcttgttttccacgccttcactctgacttcttaaaatccatctttcacaactgccagaaggatctacgttatgaacgccacacatcactccctctgctcaaaaacctttagtgatgactctctatcatttttaaactcaggttcatgttccctagcctggctaatacttataatgtcaagcctgagttctctagcctgtggaatgcttttgaacttggtctctgcctaacgccctaatcatctcttgccattcccactcttgtactacaagctcttgtaatttagatttctatatacttagatcccatgccttgcaatctctctatcacttattcatgctgttccaattgccccctcttgatgtgactaaatttaacctatccctaaagctcttatgtcccgcaggagacttttttcataactctcatcatctcctcctcctcccatcgcactgcacaaataactctcccttatttgtgctctcataaccccaacccccttcccccattgacttatcattatacaataatacaaatatgtttccttcatcattggcaaagtatctaaagagcttgagcagaacccattcagttttgtattcttggtgccaaacataatgtcacacgcttagacaaacattctgaacaataaggtggttccatttttgtttttgactattggacaaaacagagtttggagggaacgatgacgaatttctcaaattcatctagatttctttatttgtatgaattagttttttttttctggtggtggtgatggtgatatgtggagctgttactgggccacaaattgtgattcctcttgcatagattggggcttttttgaagaaactgatttgttcctcatccagggtctaacatagggcctgatacacagacacttcataaatatttgttgactaaatggacacttaacctgaaagggagagaaaagatgaggtaacgtaaacctagagcaggaatgatttttctaaattgatcagattttagtcttcatatcgcccaaaaaactgaccagacacagtgacatgagggaagctctgctgcttttctgtggctgctgatagtagtagaatttgagaattagattctttggttagggccttcgtttcttactgtctagatcattctatccatgactgagatatcacaaacagggcaactatgactactccagctatcatttattacaccagttcccacaaaacatttctctgaagtaagcatcactcactccttattacagatgaaggaactgaggctcagtgaagttaagtatttatggtagtcattagggctattcaccaatattccaggtctgtctctttctgggcaggtatgaggaccctacgtcttcaacccacttgaagttaggtgtgagctcatgactttctttggccaaggaaatgtgagcaggagtaatagaggtcatttcccaggaaagctttaaagagaatggctgctccatgcatctgggtcctggcctgaggacataaatgcagaaccaacccccagccaatccacaatggttattatcatgagtaagaaataaatcactggtgttttaagccatgagaatcaaagattgttctactgtaatctagcctatctgacacggagtgtttgaggtcactcagttagttggggggaacagggtttgaacttgggggtttagactccagatggcacatttccttgctattcctccctctgcttcttgttctctctactctcaggtttccttacttccagccacagatgctgctcttgtctgctcataagaagtgtagacactgatgagtcagtattttactgtttcaagtcagaaaatgaaatgcctggtgtttctcaatgaaggacaacaagtcggcattctgaagtgtaattttctgcaatggttctgttttctgagacccattcttatcaatcccaggaaacagctggagcacacttactattatgggctgtgatcagcttttgcctcagaaagagccattcactgtgatgcaagcagtaaccatggttacaaatcgaagtgcagtcttactaggtgaatgtagcagagattcagcatccttttcgaggatgaagaacaggatcaattcaactataatgacaagcttttccatctgtaaatgtcttgctttaaaaatcgattcttctagcacacatttaagctagggtcttgattttgggaattgctgtaggtttcaaggttgaattatttctccattttcctgagagcacctttgaataatttttgtctgagtttctagggaagtgtctagagcctgtaagaaagtggcacttcctcttacccagatagtggctcaggttatatttgttattattataataatgaccaagagagctgtgactgttgtcttcagtaacagtgattatcgtaacctcagattgggaagattccttctccctttagtggcgataattttatcatacccagttataggggtagagttttggggagtatactaattcattcagatcatcaattcattcattcatttaaatatttttgagtactattctttgctcactactcagctaggtgctgggaatttacaatgattaaggcagacacagtccctatcttagagagctaccagttagacctttttttttggagacacgtctcgctgtgtcacccaggctggagtgaggtggtgtgatcttggctcactagactgtttttgtttgtttgtttgtttttaaccaaggaacaagtgatgtttatgataactggactagtttactggataaagtggagcttatcctgaacaaagtgagaagtgcttgtagagagagtggttcacatctgaaggaggagaatgagaacgtagagaccgtcgaggaggtcgttaggtagtgagagatctagacatggccataggagtgttgattaaaggaactggagaaaaggcagcttagttagttcatgagagctccctcaatacaaatatttagaggaaagtagactttgggtgatcattttagtgaagaagatattttattgagactcctgatgtttttggttaaggagtgaatgtaatttttatagttcattgattttccaaaaaaaaaaaatcaatgatgtgatcgaagttttagttttcccagtttcaggctggcgaaggcctgttggtgaggatatagtcctcttatatgaggaagcagggttttttcttcaaaggacctttgtacactagttttattgggagggatgaggactgcagggaccaatgagggccttgtcatgaacattctaagctaagcctgggaacatatgaagacatacattatttctaaggtgactaatagaagctatacatatttaagtgaaaactagctttttctgagcatctgtgtacttgggttggcactctgaacacaatcctcacgctttttcttggtctgtgcaaatgctactgcttacctgggatattgaaacagtttaccacataaaaatgagctttattaaaatgaaatggatcacttcattaagtggcaggcttcctgtcactcaaagtatgtaaatggatattaggagactggctatgtataatgttataggagggaaactgcttggatgagaagttggttagatgagttccagttgccctttaactctgtgattctatgagccacatctacaacatacccagtctccagagaacccaccttgtggggtatctaaactcattgttccactgtgttgtgttcctggtccagagataatgtacaactgtgggaaagttctagtagtgctgtactgggggaatttctgaagccaaagttttgatactgattctgatatgaatttctttctcattctttgcttttctctttaccttggttcagcagaaaatggatttttttaaatgcacctttgcccactggcttaagcaatctttaactagtataactaggcccagtgaagcattcccacagctttttttgcatggtgattcatatattttaccacttgctctttttttcctaccgaattcattctccacactgctttagtagtaaatataggaaagtatatattgccttcaaatcagaatgacagatactagaatgagctaagaccatactttcctcaagagaacattagaaattaccattaaagaactttctatatccgtgatgtatatacataagtaagcgaggtacttactgcattgatttcttaagtaaataattactaatgacctatgcagtaagtgagacatctaacatttttcctagaagctcttgtattggtttgcctaaagtcatcacataccctctgtatgatgaataacaactacatttaggtctcactccttatttcttaagtcagctcaagatttcaacccccacctcaggatatgaattagaactgcaacctctcagttctctgaactcattttcttagactagaaaattacaaatggtgagtatatgggatcgcaccatggcaaatgtagtttactgtttcgtaaggatcttgagttcagagggatttatgcacatgattacagggcaaagggaaagagaggaaaactaacatctattgaacagctgagcaagacacttccacatgtgtttgcttgcttaatccttatgacatcctgataagatatttttatttccattttactaccttttcttattttgtcttttttcatgatattaataacatattggcataattctttttatatatgtctttatggatccattaggcccatccagaaaggagacgtgtgagccaccatgctgtcttctcctctactgcccccgctctgtcgccttccagtcagaaaaataatgcctgtagcaggtaatgttaggcaggtctgtgttgcagagccaaatatcttcaccaatgagacttcttagaactagataacttgatgtaatttaggagtagcacagtatcaaccaagagctgcaagcatctcagttcagcttgggcttttcaataagaaggaaatcctgtggctgtcatagctctgaacagaattttccagagtaactctaggatcacttgaggtcctgaagctatcacatcatttggaccctagatggcactttagctgaattgcgtaattaatctctccaagggggagaaaatgagtatatgagcaagtgcacaatgggacaggttgtaccctacctctcttctttctcagacttacagcactttggtctacagtgtcttcagggtcacttgggtgaaagaggcattatgggtccagaggtgtttgtgctcttcttttctggaggctactgctagagttgtgggtgtcctatagtcattgattgctaagagtgtatcacttaaatgaatgtgcagtcagcaagacctgaggagtttactgcatgaggaagccaattgaatggccttttcccaagtcatgttttgtgagctgtaaatctagagcagtgaggagggggcttgaacccaggaggttgcagtgaggccagatcacgccattgcactcaagcctgggcggcacagcaagactccgtccctcccaccaaaaaaaaaaaaaaaaaaaattacctcatttgtacacctttttccttcaaatacatttgtattattatttctaatccattattaattgcatttgtaattttaagtagtaaacctatgtctctattttttataatttgctacaaaaacctatttttgtagcaaatattgacagggtcttttgacttcttaccttgtgaaaaaaggatgtaggagcatcacacacagggacctgttggggagtagggggttaggggagggatagcattaggagaaatacctaatgtaggtgacagtttgatgggtgcagcaaaccaccatggcacgtgtatacctatgtaacaaaactgcacgttctgcacatgtaccccagaacttaaaagtataataataaaaaatttaaaaagtagaaaagaaaaactaaaaaaagaatgttagcatccctactctttgctgcccctctttttgctgcttcccttctagacttctgtcattggtgcttgtactttttattgtcaatataggttagatttatatatatatatatatatattttttttttttttttttttttttgagacagagtttcactcttgttgcccaggctggagtgcagtggcatgatctcggctcaccacaacctctgcctcccaggttcaagtgattctcctgcctcagcctcctgagtacctgggattacaggcatgcaccatccgacccggctaattttgtatttttaatagagacggggtttctccatgttgatcaggctgctctcgaactactgacctcaggcaatccgcccacctcagcctccgaaagtgctgggattataagcgtgagccatcacgcccagcctttagatttatattcttgtctcttatctataaattttgtgctttctctatcagtttgttctaatgttagaaatacatgaatagaatttatatcattatgactatatgaatatggtttaccctaaagctgtgtaatgaactgtaagtacattttcttttgggtagtttttcttaaatatggagttttagattgcattttaaaaattgcctattgttactacattcctaagctctttcaatatctcaaggatactgatacacctatggaatcccttgatatctccttgcagattcgcccctcctgttagctcctctcttccctatgttgccctcctgctttacgagactgattgctttccacatcactgcacagtggacattctggcattgactttcattgtcatcctgcgttggagaccatatatctctttttttcttagttaattccctcattttgcttatcacactgtcagtaactttgtataaaaggacaaattaaggttaaaattttttggagtttttttttttggccccagcttttctatatatatttttttcatgctcaattgatgatttggaagcatatagaattctttattgaagacaattttcttccagtcctttgaaatcatgttcccattatcttctaccattctgttttgcttaagagaattccaaaatctgtttcttgtagcttttcctttctagatagaacacttttggatttttattttcatccttagtgttattaaatttcacaatgattcatctgcatacaggaatttttaaattttttttggtttattttatttttccctgggtgtccttgtgatctgaagaaatatgtcctttatctttggactcttgaattctctttgataatgttctgggatattatattctctttgataatgttctctctacaattttccttgttctggcttagtagaactcctaataatcagatattggggttcctggacctcttatctattctcttatgttttctggctctttgccccttcttcccatgctctttggaaaattcttgttataatattttctaacagttttattgaggttttttcttttcttttttttggctgtatgtataatctcatacatataggttttaaggtaattattggtctaatctaaaatcttttccttgttctatttttcatagcagtctcttcatgttttgtggatacagtatcttcttaaatctctaaaaactaattagaacttttatttcaagttttctaagtgatatttcttttttggaattcttttgcctgcttttttctttaaggtatgggttttagtctttgacttcctctcttaaaccactgatggtgctcaattgtacatttgtacttaaaaaagaatatttgctttaatgtaagcaggaggcataattctgaggggtgctctaagctcaagaattcagaagactttgctgtgagatacaaacacctgtgctaattgccctggtcttttctggatacttcttgagcagagccctgcagtgtaaatgctttggcttctgggtattctgcccaatggggtagtgttatactttcttgaatccatccctttccttgaatccatcctttttagcctgtcccttactcctgcctccattgtacttggcagattccaatgtgagtttcttcagagttttgcagggaagatgttctcttttttaactccatgtccctctgcatggagttttacactgacatttctaaatagcataaatggtgtcatgttctactattctatctgctcttcttcttccagaaagtttttggagtctcttgtctatgctggtcttctatctgttcttttcattggtgtggctttatacttttgtaaaaagtgtttttttgtgaatctgtcatttttaaagtatctaggaaggttgaagagataaacccagttactatgtcatatactaagtttaccattttgaagtggtaccctacttcaagtatttatttatttatttttttgaaataaagtttcactcttgttgcccaggctggagtgcaatggtgtgatcttggctcaccacaacgtctgtctcctgggttcaagtgattctcctgcctcagcctcccgagtagctgggattacaggcgtgcaccaccacgcctggctaattttatatttttagtagagacggagtttctccatgttggtcaggctgggctcaaactcctgacctcaggtgatctgcccgcctcggcctccgaagcgctgggattacaagtgtgagccaccgtgcctggcctaaagtatttttaatttggatgcctcatcaaatcagagaattcttccactcatctgaatcagtaaaattttcctatgtcttggagctgatgtctacatatatatggaagagagtagaccaaacttatctaaattagacactgtatgtgtccttggaatgatgtggctgcaggaacctactgaagatcctctttaccttggcttagggacatttactgaaaatcactctgggtcagtgcctgtttggaatgaaggcagcgagatattcatttacttctgttatgttacaccgttgataggttttccctcttagcctttaactagctagcataggcttgctgaaagtactattcttttctctttctgcttttgtgagataagaaggtcacaaattattttatatggtttcatcacattttggggagggaataatattttcttcataattgttgtgtgtgtgcgtgtgtgggtatgtgtctatgtatattagtgtgctcatgtatgtgtgtgtgaatatgagacagagaaagagaactacaatcacaaatactataatcacagggaccacaggttccttgaagtacattatagggacttttttatttagtaaattttccagtctttatatgtcttttgaatgctttctcagctgagtggagattttgtatgccttattaatgtatgtgtttgtgagaaagagcatgaaatattttttaagaaatgaagctacctattatattatattcattcattcattcattcattcattcatgttggggtcttgctttgttgcccaggctggagtacagtgatgtgaccatagccaactgcaacctttaactcctgggcccaagcagtcctctccccgccccactgcctctctagtagctgggcctacaggtgtgcaccaccttgctcagctaacttttaaaaaatttttatagagatgagccctcactgtgttgctcagggtggtcttgaactcctagattcaagtgattctcctgctttggtctcccaaaatgctgggattacaggcatgagccaccatgcctggcctaacctacctattttagatcacaataaaaattatatccagtgtaatattattagaataagactctcaatgaattagagcattttgcttttgctggttgaaattggaaagaattagaagcggtgaaatttttgtatttgatattgagatgtattagacctaacactgaatcttgggaaaggcccagagagtagtcagaaaattaaaaaacaggaatgaacagggtctagggaattgaggttaaatagattatcaaagggactgtagataacaaaggtcccaaagggcagggaatggcttttaaaataagagaatagtatttatgaagcctaattgatgcaggtatctgtgatttgacctctacacactttcagctctccatataaggacatcctctctattatctttatcccatacattaggaatgacatcagcttttggcttcaactttactcacatactttgatggttatctgggtcttttgatgtcttattttctccacatttgctccactttccaagacaatcatatgcttcgacttattttagtttctcccagcttttctctaccccagcctctcctttcctttagctgagatccttacactctgccttatttctcctccatcctcacatcctcattccttctttgcagggaatttctctttttcctctttattgcttcttcttttccctctgctcaacgacaggctttgggccagtttggcagagtctttcagttctgttagttctgggccagctacaaacttcttacttatttactctaaggctgtccaagtctgaaggttcttggagtgtgcacacagcatctccctccataggaaatggactttgcacagtagtgtttatagtagtaactccaaatggaggtaaaatgataccccatcactattattcattcacaaagtattaagtgccactaatgccaaggtctgaggctataactacaatcaagacaaaccaagggccttggctctaggctcttggagtttacattatataaaataaaaacaaactttaaaaatattttaaacaaaacaaaacaattaaaaagaaaataagcaaaaatacccaaactgattttttcttagttatgaaattcctccaaagggcaccttctgactgatgatatgtttataataactttccttagtctaatatttaaaatatttttgtcttttatttagggtgtgggggatggaagtgggttggagaccataatgacatgcttattttattttattttttttcacgggatggggaagctcttaataacctgttgctgtctaaaactaggaaactggtctgacagaaatccaaactctcttttagcctttcttctagactttgtcaatcaaactcattgtaagcatcctaagtgatttgttctctttgtcccattttattcctgtttttagtgagtgaaatgggaagaaattagaactgaagtaacttgaaatatggaaaactaacatagaaataatggagaataggctgtatgtatattgtggaattttgcaaacacttgactatggctatgaatgaagacattcagaagcctgtggtgtaattcttttacaattatattgctgctgcctttagcatccttctttgccacagagctgtggtttgtgacaactatttaattagaatggcaaacagagtggctaagttcaatatttccccccttcttttctttatgaaaatgagaaagtagagtaataccatcttcatttttggaactgctaagttggaaaccaggaacataactgccttaaacctctgtagtgatgttattctgcacataattggcatgaaaatagaatatattctctgtggttgtacattacattttctctttattagccatgatgaagtttatgtgtttatgcaaataacacagagagataagtttccctctcagaggcagtgagattggcattatgagatccatgtttacattatggttttaccacttgctatgtgaccatgaacttaacctgcttgaagttcatttgtttattatcaagtggtaataataatactaacctcacagtgttgatatgaggattaagtaagataatgtgagttcaggtacctagtactcaaaaagattagttgaccattactctcgaatatagacattttctagtaggtttgttatgccaacaaaggaagaagaaagaacatcaatgagtcaatgtgggtgtagaaaacattaacatacattattctgaaatgacatttattgctagttttatggtcccaagcaatgaaaatcagacccatacctccaaatattctgacaagaacatgcagatcctcttgtatgtctattacatgtaagttatcttagttattttttgtgctacaaatgttatttattcttaagaataaaaaaagattcaatttatttcataggccatgagatctttgttttagcttgtccatgggttctctattggctcattatggaggtatgaggtgaggaggacgtttatgtgtcattgtattacattaatatgtacacattcaaatatcttctttctgtgccatagattctcctcacccctttttattgtaactaatagttataattgcaaaggactttaaattgctacatgtgtgctaaagaataacaatgattttcaaacttagtacagaatgtaattaatttttatagcaacagtatgtacctgccaagtgggtactttgaaaatgaagttgtttttgattgtgtgaaactgcttgaaaatgtgattctccaaagctttctttttcttatggccagaaaatagtgatatggaaattaattatgattatgcacttgagactggttcttcttctgcttttattttctttttttttaaatgaatcttaaaaaacacaaagtttctttggaccaagaacaagcataagacatttttacaccctggattttaggtggaaaggtcctgctggttgtagctttgagtggatgaaacaccacttgcccaagaagcaacatactttagggtacacttgtatttcacctttttggtgcaaggtgacatttttctctagcatccttacttgctcaggattgcagtataatgtgtttacattataggccaaaatctaagtagaaagcactgatttattctgacaatatgtcttctgaaatgtcagatgtaaaatattcacaagaacgttgttaggaacctgttttccaacaccttcccaggttagcaaaaatgccacacaccaatttctaattcccatgtataatctggttgataatctcttttggtcctcatctttttcttcttggatttgggtgatatgtttctggaaaaggctgattaaacagtgcgtttccaaaacaaaattatttatttggttgtataggtgaggattcagaggaaaagccagataacctctttgtgtgtttatgtggcaaggatgataagttaatgatttgcttgaggtatgatagtttagagcagtagcttggggagggcaagattattagaattatcctctggcgatacccctccaacgtatatacttctttcaacttagattccaactagtatagatactgttaagataactggtttatttagagtagtggttctcaatcttcagcatgattcagaatcccctggagggcttgttaaaatgcacattggtgtccacactccccgctcatatccagagtgttgatagaattggtcaggcgtattcaaagaagaattggtactaaatcttttgacactattccacaagatagagaaagaaggaatttcattctgtgaagccagcgtcaccctaatacccaaaccaggaaaggacataatcaaaaaagacaactacagactgaaatctttgatgaacatagatgccaaaatccttaacaaaatactagctaaccgagtccaacaacatatcaaaaagataatccaccatgatcaagtgggtttcataccagggatgcagggatggtttaacatatgtaagtcaataaatgtgatacagcatataaacagaattaaaaacaaaaaaaatcacatgatcatctcaataaatgcagaaaaagcattcaacaaaatccagcatccctttctgattaaaactctcaacaaaattggcatacaagggacgtacctcaatgtaataaaagccatctatgacaaacccacagccaacataatactaactggggaaaagttggaagcattccctccaaaacctggaacaagacaaggatgcccactttcaccacccctcttcaacataacactggaagtccctagccagagcaatcagacaagagaaataaatggcatccaaatcggtaaagaggaagtcaaactgacactgtttgctgatgatatgactgtttacattgaaaaccctgaagactcctccagaaagctcctagaactaacaaaagatttcagcaaattttctggatacaagattaatgtacacaaatcagtagctcttctgtacaccaacagcgactcaacggagaatcaaatcaagaatgcatccccttttacaatagctgcaaaaaaataaaatacttaggaatatacctaacgaaggaggcgaaagacatcaacaaggcaaactataaaacactgctgaaagaaatcatagatgacacaaacaaatggaaacatatcccatgctcatggatgggtagaatctatattgtgaaaatgacagtactgtcaaaagcaatctacaaatttaacacaaactctatcaaaataccaccataattcttcactgagttagaaaaaaaaattccaaaattcatatgggaccaaaaaaaagcctgcatagccaaagcaaggctaagtaaaaagaacatctgaaggcatcacactacctgatttcaaactatattaaaaggtcatagtcaccaaaacagcatgatactgttataaaaataggcacatagaccaatggaacagaatagagaacccagaaataaacccaaatacttacaaccaactgatctccaacaaagcaaacaaaaacataaagtggagaaaggacacccttttcaacaaatggtgctgagataatcggctagccacaggtaggagaatgaaactggatcctcatctctcactttatacaaaaatcaactcaagatggattaaggacttaaatctaagacctgcaactataaaaattatagaagataacattggaaaaacccttataaacgttggcttaagcaaggatttcatgacgaagaatccaaaagcaaatacaatagaaacaaagataaatagttggaacttaattaaagagcttttgcatagcaaaagaaacagcaaagtaaacagacaacccacagagtgggagaaactctccacattctacacatctgacagaggactaatatccaggatctacaacaaactcaaacaaattagtaaggaaaaaaaaatcccatcaaaaagtgggctaaggatatgaatagacggttctcaaaagaagatatgcaaatggcccaacaaacatgaaaaaaatgcccaacatcaggaatgatcagggaaatgcaaataaaagccacaatgcaaaaccaccttactcctgcaagaatggccataatcaaaaaatcaaaaaacagtaaatgttggtgtggatggcggtgatcagggaacacttctacactgctgaggggaatgtaaactagtacagctgctatggaaaactggaaaacagtgtagaaattccttaaagaactaaaagtagaactactatagcagcacaattcacaattgcagaattgaggaaccaactcgaatgcccatcagtcgacgagtggataaagaaactgtggtatatttataggatggaatactactcagccataaaaagaatgaattaatggcatttgcagtgacctggatgggattggagaccgttattctaagtgaagtaactcagaaatggaaaaccaaacatcgtatgttctcactgatatgtgagagctaagctatgaggacgcaaaggcataagaatggtacaatggactttgggaacttgaggggaagtgtgggagggggtgagggattaaagacaacaaatatggtgcagtatatattgcttgggtgatgagtgcatcaaaatctcacaaatcatcactacagaacttacgtagccaaataccacctgtatcccagtaatttatgggaaaaacaaaataaaataaagaattgctctggtgtgagtgtcaataatctgcctttctaacaagcgtacaggtgatgtggatattgctggtctggagacctcactgtagaaaccactgatttagaggattgggaaggatttgtctctgcttcaaggtcttgggaagtcaggatggggagtttggtagggagggggatggaaaaagattgaagaatgctgatcatcttgcttagttactagaagtgttgactagcagactcttgcagtgttaaacattagtgaagctgttaatattaattacttttattaatgagaatcagagaaagttaggagaggaaacagatttgattatttcttaatactagtcttctcttcctcatctggttcctgcatttttcttggacctgaacctttctcttgctcctcatatagtataaatatagatagccatactatcactgtctttcagaaatgcgaagaatgatgagacggtatataaggtttcttggaaaagctgtcacatcaatcaagattacaattataatgaaaacctcattaatttggcttctacctattcagattttgcagcagttaggacagtgcttgggctgaaatgtgcctttgcagtatttataaagagtgcctatagcaaatcaatgactttaggctattggctaggaaatttaaattacttaatggaaaactgctttaaatttatttcagtactgccacttacatataaattatttgatgattagaaatttatcttacctatttatttacataagctattttcaacatgattaggattgctaaggcttcattgctttaggattgtataattcagatttattcacttattcaggcagaacttttactcagttagtccaaatagctggttttgtttttaaatgtcaagtgcaaaattgtctgtactcatcattttctattagtttcaatctcagcattatttgggggcattcagattgtacctagtgtcttttgtattgagtggacactagaaatctaatacctggctcaaagaagaaaatgtgcccttcaaaggggttcttttaattttgcacataaagcacattttcaaatgttattttcctttgaataatgctctgtgcttaaattttcctagaataaaacacccaaccaggtaaaagatttaagagatctaggccatgcttacttgatgaaatgcagcagagtggaaaatatcctgtcttgccagttcaaggaaattataatttttctgatctggtagttaaaaggaatgatatttaaatagctgctgttatataggcattaatttattaggggcagattttagtcttttgtgaaattatatgttgaggtctgtatctgaaggaattaaagtctaatctaaagaattatttggaagcaaatgtgaagctatgttagaacttcggtgcttcttttcaacccttgtcctcttgctgtaaagagcagcctgagtcagatcattgaggattaaggatgaatgcattactcagcaccctgcagcagttgggtcaaacatcttggctttgaaaagttaggtttttttttgcttagcaagcctagaaatttcaggtccaactgcagaatgaaagttcagtattctgttgattaacatggtctacttgaaaacagcctgtggctcttctacatgtccttcctctctatttgtgtatgatagtgtctgaaatcattggatggatcaccggtgaaccatattgacagctgctatatggtcagggagattggttcccatgtagtattccgatgacatccatcctttcacttgaagaagaggtttaacatgttaagggggaaaagaggatatacttattttattctggcaaatgggaatgcagagaaataaggcagcctgtgataacactacattgaggcaaagagtgaggattctacatcagatgcccactaatgagaaatattcttgatccaagtgttagccagagaagggaacactttgaccaagacttttcaggttgatctgagtgagtggcatgctaggaagggctgcaaaggcctgggggagaggaggtctgggcctggcatccagggtcagctctgctgaagatgaggaaacagccgctctctgcaggcaacaggaaaaggaaaggaaaccagatagattagcatgtatgtaaagggcaatgacaaagagtgaacaaaaccaggaacaattttatttttatgcttattgtcttagaagtttctttcaaagtttagcttaccttgaaactgaaccaggcagtaagtcctaaacaaggtatttgagattttacatactttacatttaactatgtttgtactccaacctggactctggaaaactcttcagaagaatcctagtgtggttaaaagtatcatcaccatttccatcatcatctactaatgtttattaagtataccaccaaagtctttgtgttattgaaaagaagtctttaattagagtttacttgtgtttttccaggtagcccagccatgacccataggaatctgacttcctccagtctgaatgacatttctgataaaccggagaaggaccaggtaagcaaaaaattcttgcttctttgaaatgtaagagaacgtatatctaaaagatgctgagaaaggattagaggtgatggttgcttcacttaaaatggacctttacgtgcagacaacagtttgcactttcctgggcagaaggagaagcagtgtgtgaagggagctggaatcagaagggaaaaatgtgcgtttacttcagctgttgcagatgcatcacttgggcaatttaaatcttaaagcaatagttgtctcagctttaaaatagtaataatccctgccttctgtttattctagggattaaacgagataacttatgaaaaaaatactttggtaaattataaagaaatacttgcctggcacagtggctcatgcctgtaatcacagcactttgggaggctgaggtgggcggatcacttgaggccaggagttgaagaccagtctggccaacatgacaaaacccgtctctactaaaaccacaaaaattagccaggcacggtggcacagggctgtaatcccagctactccacaggctgaagcatgagaatcgcttgaacccgagaggcagaggttgcattgcactgagatcgcaccactgtgctccaacctcagtgacagagcgagactttgtctcaaaaaaaaaaaaaaaaaagaaatgctaagaaatgctgaaattgttgttaacttttgggggatactttagggcaaggtaatgacagctaagttctcactagctatatatttgtttgtctattaaaacatatagttgaatgaagagcaatcaggttttgaatatctgtttgctttctttggaagagaatatggtgtaaactgggccatttttgcccagctacgtaaatatctctgcaagaaaattatattttaagaatatagtatatggaaaaatgatgcttcctaaatgaaaaaatttcaaagttttgaagaaatgaaagcaatatatttaaaaaaatcatagaaatcctaagactgtttccccaggattgaaggagaagtagcatatattggaaagaagaaggaacatgaagcaagaaaatctggtcttgctacttgttccaaaactggctagttgtgtgatgatggacactagttttgttctttgctaagtggaaactataatacataactcacctcagaaaatcaaatatctgatccttgctcttttaacttaccattttgtcttttgatatagtagaagagatggttctggttggctccatgcttgatatgctaattgtacagttagtcctccatatccgtggtttcatatccatggattcaaccaaccatggacagaatgaaaataaaattgtgtctgtgctgaacacatacagactttttttttgttgtcattattctctaaataatacatcatagcaactgtttacatagcatttatattaggtattataagtaatctagagcaatttaaagtgtatatgaggatgtgtgtaggttatatacaaatagtatgccatttatatcagagtctttagcattgtccaattttgttatctgatggaggttgtggaatcaatccccaacatatactgagggatgacttgttctttctctttctgtcttttaagtgggtgagtttgaagattcttcttttcacactttgctgatttttttcaagaagccatattcatgatggtgttcctctttaactgacagcacttgtagtagtcatagaggtttataggccttggtgaattctagaaagtacgggaagggtgtacattccattccattctcccgtcccttcccctccccttccgtcccctcccctccgttcccctcccctcccctccccctctccctccctcccttccttccttccttccttcctccctggtagtgtcttcatcatctcagatctgaattgctagaaaagctgttggaattgatcccttgtccccattttttctcaattcaatatactttttacatagttgccctcatttttctactctagattaaaaatggttagtggcttcccatcattttaagttcaggacttcttgatgacctttatgatgctctgaaatctgatgttatccgtcttgtcttcatttattcatttgtgttccccagaagagggactctgtttaggtcaggactaatttctttacttacctcccactttacattgagataaattcttgactccttcagttgctccttcagatgctaatgtggattgtcaccttcctttcatctttctacctcttgaaatgatcaggaagaagagcatttaaatatgggtacattggtagatacatacctgtagtggaaaagggagaactcaggccactagaagttttcttaaatttatttcgcacattttgtctccactcattgcttaccaagccatgctgattatttgcaaggtttgccatgagtcttaatactggttaaggcagtgtactaattagcttaggaatatcttgttgatggagttcttgaggaagccttcttttattaagggcagctctccttttgccaggaatttggcaagaagcagctggtaaatgctgacagataaatttactaacttattgggtcttttcatatctgggcatatgcagaagaaatctgatggcttaagatgcatattacataaaattttgattccagtagtagaagaaatatgtggaacattttttgtgggtattgattttgttataaagcccatgggaatggagtctttaaaaccagaatcttcagtgcctatcactagcatctcatagtcatcaaggttcatgtttagatgaagcgaggaaaatttaattcaggaatgttccttttgttttcaaagccagcaaaggaaggttgatgaatatataattataagaccaactattaatctaatttgtatctattacagtgtatatagttaatccaatgagttcttcaagaaaggaagaaactccattctctcttcctaccagagtttgaagagaggcttttgtaactaattcataatctcttctacaaccaaaggtacaggtacagaaatcaaactaacattttcagtttctatacctactattttggtaacttcaaatacaaaaactcctggatcattttagggcaagaaaaaggaaagtggatttgcaagtaagatgaagctgtgataaactctggcttttatttttttttaacctgtttcttctctgtttggacaggaaagaaaaaaaaaggtttccaggcttatgtttgttttgagaaagcttttataattaattagccagtgtcctggaagtgatcttggcagtaaactcaaacttgtcttgtgtacttgtccaagttggccccaaaaacttccatttgaccaggactgaaatttctgattgactgattattctgcctggatacaatttgaacagttgtgatggtgccttgcaacttcctggagctacctaacttcttagtagcacaaagaatgggttcagagttatgaagaggaacagaattgctctttctgacagctacatagtgacagaatttgagggcatattttttatgagattctgttttgggaaaacagaagaaacaaatctgtgggctgcactttttctttctggctttgccaagcctatgtgcttacgatttcagtagcggctgctttattgaaaaatggcttaaaatagttaacagcagaagaagagcatagccagaatttaggtgattcaatgcttcaaccatattccaacttggatgttatatttattaagcagaaaaacacctgtggagaagtagatttaaaaaatacatctggagttcatctagttgtaaatctacataaataatctcttctattttgttgctatggagtatttttcacattatctaattatgtttcttgattgcctttgatttgcttttccatttcttcttattctttttctgttcttttaaaaatttacatgtgaggtgggtgcttatcaaatgcagtggatttagttacagttttcatgtgaatatggcttcagctatgaggataagaaagagcttttctcttcattttaccccttagctttaactcttgtagaaatactgtgcttagtggtgcaatggctttaaaaatgttgactttttccaggtttattaataatgctataacatctcacaattacatgtcaacctcaagtgaaattgtagtctgtagattgcagtggatgcagtagatgtagaaatagcctgcagattctcagggggacacttgaggtctacataaccttgtaactgcttatctggttattatttctgtgatattcattatttagctggctaatctgagaatctattccataggtcttgtggtggagttttgcctaaggttactttctaaagcatattagaatcatttttagcactgtctgttgcctattatgtttaaatatattttgctgccttgattcttgtgtttgaagtcttggtcttttaaggaaatagacctgaatttaaatattttgtcagaaagtatgcggatgaaaccattaaccatgtataagtttaaagttgctaagccataactatcttaaaatgaaatctagaaggaaacatcctgtgattattgggggaataacccccaatccttttcttacacatacatgatataggagtgagtcaaccaagtccactgagatgactttttctcatgattttgaacatagatttccatcccagggctcacataaagcttctcttagcattaatagttatttcatgctcacagtgaaggaaaagtacaaaagcacctccttttcctttccatggctcagtcaaaaaaacctacagttcacactgaatgtgggtggtcttacttcacccctcagaggaggtacagtgtctaagaaagattcatattttctgaggttataataattgtctttagcatgttttcagggagcagtgagacattgctgtgttagaggagctccagatggaatcacatctgtgaaaacctaagaacaaaggcatgttgtgagaaggtagttagggtacttagaggtccttagtcactacagttttggtgactttggtgagcatctctctggctcagcacctacagctttccttcagccaggtgtccctgaggggaacttgtgtagccatgcaatgatatccttgggcccctttcacagggaaacagcttgtgcttagataattaacaaaacatgtctgtcattattttttccctgtctacaagaaatttggcttaagatagcttccttttcccattctatgcttctcccatattcttaaagcttaaacagttgacagggattagtagggtttgagaagcattgatattaatactgatttaaagaaggtatgtattttaaaattgggacagttgcatctccgcatttattaatgttgtacattcttaaaagctatttgtctggaatagaaaactagcattcatttaagaacgggttttgtatcagctttaaactgaagtagatgatcctgtatgaagtaaactgaactctatctcgtgtattattttaggaaaaaaggagccttttgtgaaatttagagctatggttttaagtaactgcgctacaataaatttgaactcctaaaacaccccatcactgcatgcagctatgatttgaattcattcattcaaaatgtatattctgtgctagaaaatgttcttagttgtgggttccagaagtgaatgaaacagataaatcttttgactcatggaacttccatacttttgggaagagacagactgtaatcaagaaaaacaataaatacataggataatttcacataatcaaaagtgctatcttgaaaataaagcagggtaatgtggagaggtacaggaaaactattttaggtaagagggttagccagtaaggagaggatctggtgagagaggtttctaggctgagcaaaaagcaagagtagaggcctaaggcagaaatgaagatgatgtgttcaagaaacaggaaaaaaaatatcataagtggctggagcaaatgtagcaggtgtgcagtggtagacaagtcaggaaaataggccggaggaccttttattttattctgagtgcggtgagacactctcttaggatttttacctagagtttgtatgttctgatttacattttaaaaagctcactggagatgcaatgtgataggatggagaaatttgtgaatgtgttggatcgtctggtgttattcctatattaagtattgtatgaatatcccagtgcattaaaatgagagctcacagacccataagagcccatttcttaatgtgttagccatagccattaagaccttattactatcagcaaaggaagttcttctgtgccatagaaatatcgtaagaaagaaaaagagtttcccagttaaaaggtcatccatgtactgttaattatattacattattaatgagtaaatattaattattgaaatatttaatgcactagaagtgggtgtaagccaccaagaatagtgagattgaatttttgagtaattatatttgcacctgtggtcctcttgttattactgttggctaacatgaggcatgccaactggctaatgacacatgattcatgaaagcttcactggagtcctctctgaagaatggtaacaggaaaccttcttagtctttgtggttcagaaaggagcatcaggatgtgtaggaacaggacagaacagccaaaaaggggctctgtgccacattcttacctgttcctatgaaagaattgaactccgattgcactgcatccctgtattcaacatttaaccaaagaaattgtagctattgcatatcttaataaactggcatgttttacatttgatgtcactttttttctcttttcaatatgtagcattctgccagtatgccaataccaggaatatacctagaatatatttcagagaacagtagcatgctgtcaacaataatctttgatggacgtatactctcacatcacaagttacttacatctgacagagacttcataaaagaaacgagcatttttcttcttggaagtggcaaattgttacaaaaccagaaaacagcaataccttgtgatgaacactcttgagtacagtttttaaaactttatagaaattgtaaatatatatagggaatcattctttttttttctttttgagacagagtctcactctgttacccaggctggagtacagtggcacaatcttggctcactgcagcctccaccttttgggcttaagctattctcttaccttagcctcctgaatagtggggactacaggtgcacaccaccatacccagctaattttttttttgtgtatatatatataatttttttttgagacatgcagttttgccatgttgcccaggctggtctcgaattcctgggctcaagcgatctgcctgtcttgaccttccaaagtgctgggattataagcgtaagccactatgccccacccatggaatcattctttacttactatagtaacatgttattatccacaatattttttaaaactttagaattttctgattcaaaatatacaacaatgctgtaaaatttaaacaaagcaaaaatgaataaaataaaaagtgaaaattcttaaattaaaatccttcaaaacaactgccattagcagcttgatgttgagtttaatgaacttttctgatagatgaatacttatatatttctatataaataataaaaatgtgattgtattgttctaaaatttgatttttttaaactaacaataccatggacacctaccttattcttcttaaaggctatatagtatatatgaatcgtattttattgattctatcttctatgactagatattttcagttctttgctgtacaaataagcctttaagaagtatccttattgtaatttttctgcattctttcatgagtatttctggaggagaaatttttataagtggaattgctggattaccgtgtattgcgaatttaattaccttcccaaaagattatatgagttatgttctagatctttaaacactttattgaatccgcctccactgctaagatactatttgctggtcagatttgagtttattctttatgtttcactccactaaaagcttagtgattcaaaatgaaaagaatctcagtatctagcatttgcctcccagctcactttgggggctttttgtcagaagcttaaagtatagagattaaaactgagtttattttcctgatctaattggacgtccgagctggctaatcacttgtattctgaagtaaggaggtgaaaagtgcagtggccatatacttgctttgactgaagatgttgctgttcccagctctgagagggcttttcaggctctgtgagaatttccttggcaaccaaaaaatggcttcatctcaagagcccttcttggtggtcagcatttggaacaaaaagaaaaattgcaaaaagagttggacaagtgttccctttgaatattattcaacacatttgcagcttggatctacatctccttcctttccttcccccaacccccaagagaattttaaatgcatatatgccagactgtaaagttagttaaataaaaagttttataccttatatggagtgctttattaggagctttgaaggagtgttgtcaactgaaatggctaataaaaagatgagccaacacttttttttttaacatgttggggcatatttgcagattctactgctccccaatttccctcttaatagggaatctctgcagagtaagtttatgaagaggtcacaccatgggaggaagtttttcctgttcttctttagaaagagaagagctccccactgtttctagctcacttgtctgattgatccagtggctggttgatttatgtgtctcagcagaatctcatgaccttatcagtcaccagcagagcttcctggtttctccatgtgttacccaccaatgggctggttttacttcctagaactgaactgaaatgaaaacaatgattcttttttttttttttttgccaccatgttaaaaggacagcagtaatgttttctacaatctgaaagccagtggttaatcatgccaagatgacattcctgactaatcagtgttccatgcatacacatataagagggtaggaagtaactgagtcattgcatagggagtgattgtaagctttgaacttcaaaattagctgtactcttcatcattcagtagctgtatctgatagtattgagtctattgctacgtaagcaataattaacaactagcatagattggacatctaattacaactaatgctttggggttggtactgtcaactctatttgacatattggcaaactggaggcatgaggagattaagtaatttccctaaagttaaatagcatctaaatgatagagctgcatcctggtcctagtgcctgtgctcttagtggatataatgagttctgcctagttggattagggtctttttaggtccctgaaagccactgtggaacagacacgtattcaatcgaagtttctggcttttggtttgtctttgaggcaaacatcatgctgaataggctaattaccagaattactattaaaaatgaataataaaaaatttttaagggtcttatggtgactggatggatgtttctgctgccacaatgattaaaatactcaatgttatgtgctgatactctggatgtcattggtgaaggtcagtgaaaaaagactgatataataaaaaagtataatctatgatctcagattgtgagtttatatcttagctgattattcacaccgaataaactgtggtgctgacagtgaagtgcagctggggttcagtgaaagacacaactgtgtgggccaaagccatcaatcaaagaggaaccagggactttagaagcatctttccattctagagaacaaaaataacagaataaaagagttttaaccaaataaaacattcttccttggataaaaggttaggtaagaaatgggagaaataaattggaatgcaactatctagagtttagcaatacaagtaaaagacttagttcatctaataaatggaaattattgtggcttttagaattatttgaaataatagccaaactttccaaatttgaggaaatacaacatttcaatgttttttttttttgtagttagtgtgacatgtagaattagtgaaagtagattagttagttgacttgtccacagaccacaatgaatagagagttacaacacacttaatttacagatcttcacttgtgctttgctaaaccccatggttctttgactttcaggctgttaaatattcattctcactatagatagggtcaactctagttcatttagtctgataaatgcacatcattatgaccttaaaattttgttctggtaagaggaaaaagtgattattattgaacttttttattaataagctaagatataaacttacaatctgagatcatagattatacttttttattatatcagtcttttttcactgaccttcaccaatgacatccagagtatcagcacataacattgagtattttaatcactgtggcaggagaaacatccatccaggatcataggaatagctttgaagacttaagtaagcatagtaaaccttaactcttctgaacttcagttttctgattcataatagagatattatacttcagtctgaactgctttttctactgagttgttttgtgaaaaggaaaatacttaatacacttcaaaatgttatataaatcttcatcatcattgccattttcattatttaaatgggctactgcttttttatttttggttttgctttgcagtaagatttggtgggatgaaagtccatttcatttaggtatcattccttatcttttaaatttgcattgttaatttggctctttggagttcatgctcttaacttctgctctatactgctctatccacactgtaaagaaatgtatgtccgattgtcatttcatgaatcttattgaatgcacattactcttgtacccaaatttctctttttctctctacttttccaagtcttacctttacttcaaaacttgtcaagtgttactttttctttatatccatccttgaatattccagcttatgttaactactcctgttttgaatttccaataccatctagtacttattattttcatcactgatgtggtttggctgtgtccccacccaaatctcaacttgaattgtatctcccagaattcccacatgttatgggagtgacccaggggcaggtaattgaatcatgggggccagtttttccttttctattctcatgatagtgaataagtctcatgagatctatgggcttatctggtgtttctgcttttgcttcttgctcattttcttttgccaccaccatgtaagaagtgcctttcacctccctccatgattctgggcctcccaggcatgtggaactgtaagttcaattaaatctcattttcttcctagtcttgggtatgtctttatcagcagcatgaaaactaactaatatagtaaactggtaccagaagtggggtgttgctgaaaaaatacccaaaaatgtggaagcaactttggaactgggtaacaggcagaggctggaacagtttggaggtctcagaagaagataggaaaatgtgggaaagtgtggaacctctagagacttgttgaatggcattgacaaaaatgctgatactgatatgaacaataaggttcaggctgaggtggtctcagatggagatgtgtaacttgttgggaactggaacaaaggtgactcttgttatgttttagcaaagagactggaggcattctgcccctgccctagagatacgtgaaactttgaacttgagagaggtgatttaaggtatctggcagaagaaatttctaagcagcaaagcattcaaaaggtgacttgggtgctgttaaaagcattctgttttagaagggaaacagagcataaaagttccgaaaatttgcagcctgacaatgcagtagaaaagaaaaacccatgttttgaggagaaattcaagccagctgcagaactttgcatgagtagcaaggagcctaatgttattccccaagaccatgggaaaatgtcttcaggccatgtcagagaccttcatgaaagcccctcccatcacaggcccagaggcccagtaggaaaaagtggtttcgtgggccacacccggggtccccgtgctgtatgcagcctagggatttggtgccctgtgtcccagatgctccagctgtggctgaaaggggccaatgtagagctcaggctgtggcttcagagggtggaagcctcaagccttggcagcttccacatggtgttgagcctgcgagcgcacagaagtcaagaattgaggtttgggaacctctgcctagatttcagaagatgtatggaaatgcctggatgcccaggcaaaagtttgctgcaggggtggggcccttatggagaacctctgttaggtcagtgcagaagggaaatgaggggttggatcccccacactgagtccctactgaagcactgcctaccatagctgtgagaagagggctactgtcctccagaccccagaatggtagatccactcacagcttgcactgtgtgcctggaaaagctgaagacactcaatgccagcccatgaaggcagccaggagggagaatgtactctgcaaagccacaggggtggagctgcccaagaccatgggaagccaccttttgcatcagtgtgaaaactggagtcagaggagatcattttggagctttaaaatttgacacccccactggattttggacttgcattgaccctgtaacccctttgttttggccaatttctcccatttggaacagctgtatttacccaatacctgtactcccattgtatctaggaagtaactagcttgcttttgattttacaggctcacaggcaaaagggacttgccttgtctcaggtgagactttggactgtggacttttgggttaatgctgaaatgagttaagactttgagggactgttgggaatacattttcaatttttggagaagttcaagagagaggcagttgtaaaatagaatactagtgtggtttttttggtttttgtttttgttttggaataaatctgaatttagaatgattccacattaattagttccacaggagtatatacaggcaaattttatattggtggtattctctttcccctctcctttcttgaaaataacaagccactagccagcctgtggtagtgcattaatcattatttttacattgatacaaactattgtgattttttaagctgagaccatagaaagctgacaaagcactgtgggcatatatagcaaatgtaagacaggtttttgtgctgaaagagtgtacagaaagtgtcactcgtggcttataaccattcgatgactacctgttgcctttatgataaagcccagaatccttggcatgaccttccaagacctgcgttatcctgcctggtgtctctctccaaagcagatgtgccaggttttctcccgtcctgactttactacaaccatatggtattcttccagtttcactaacatggcagtctccctcctacctttgggtctttggacatgctgcttttgttcactgaaatgtgcttccttgtccaggcaactggtgttcgcccattatttctctgtaaatgtcaccttttcagggaagttttctgtgacacgccccccccctcttgcccccagtctttgctaggggctgctgttataagctgttacagcacatgatgcttttctaccatgacacctaccacaactgtcatcaaatagttgcctattttaatttttggctacatgtttatcttcactaataggccatttgcttcaaaattggagaaatgatatccagccatctgtagttcatggaccatagcctgccagtaacttgcttttgtatggcttgcaagctcagcaaggttacagttttaaaaagcagttaaaaaaaaagaataagtgacagatactgtatgtttgctcataaagcctaaagtatttagtgtttggtctttcacagaaaaagtttgcctgtctgtggtctaagttgttgctatacatgttgggtagaagaatgtaagtgtatttatatgctacgttttattttctgagcagggcacttcattgtaatgtggcatctatagggcctagtgatgttgctgtaagcacttagacaaactgagggccgcatgaacatcagaaggttcttagctggataaacaactgtactcgaagtgtgtcaattaatagccagtgtaaaagtggaagaggtttctaatgccatggtactttttagcatgtattgctctgctaaacaactgtattagcaatttagattaagacataatacgttattatcagatttacaaatacacaaaactgccatctaaaatttaagtaatataattaagatggagaatgatcttgacaggcttcaaaccacaggaatttcacaagagtaagataaactatgtaagatctaaatgtggagtgaataagaacgtgaaaaatcctactttatttgaacagagaatttatgactttcagcagatttagactcttcaaaggtgtccattattcagaaatacttgaggagatgtagttatggtaacagtgtagtgagatgcctgggcactaacctaagaagaaaaatagaagtaactcatccaaaacttttagagatgagaaagcttgaagggtacaaggctcatgaaagttgccttccagtgagagagaatagatttattgttttttgctccagatataaaattgcaatagcagatggatgtttcgtggaagcagatttcatttcaatataaggatgaattatataggaaattgagctttgtcactaatgtatatatgaactttttaaagtctttctttgcacttaaataatacagtaggtatcaggactacagaaagaaacagcaaacaatccctgctctccaggaggtctcattatagactgtgagatgaatcggtaaataatgtaggatgttagatgtcctagcacagaaatggagtatgaattttgtcaggaactggggagtgggcagaggtgactctgaattaactcttgagttgatgctccttctttcactataatgtaccagaagaagcaaatgactgtatgttaggaatgtgttcactgggtggggtattataaactagtcaatctttaagtaatttaaagactttgtgatttataggaattcaaaaataagaagccgactttgggcttgaccttagaacaaaggagtgaagggatctcaggtcaatatgtcagttaagtaaccataacctactggtggctcagccagaagcccccagatgcagatgaagaacccctcaaccaaacttctgtatagttgttgcctgcctttgtgtcagtgtcttattttcctcttgattccttttttctgcttcttcagtattctttattgttctaatttggtacatgttctgagacctccgtgaagggtacattaaaaaatctgctaaataaataatagcatgactactacagatttaattatagctatacagctgcctgtttgaagtgttctgctggggccatatgttcccttgtatatctcagccctggaaagacctagtttaattgtttcccagcttatagtattgaattcttaaagaactgctagcagtcatttggaagtcaatagattgtgtgttttacctcaactgtctttctgcaactggatgttttattgacaatttcttattagatcccaaataatcagatattaaagcactcatccagacaggtcttaagagctatgtctacttgttagttttacagtctgatttttgtcatcatatttgatgtgctaagtgaaaagtacttctgcatttaagcactttccctcaatggcttttttgaaaaaaagaaaagtattttagtggatgattcttttaatggttttctgtccccatggtatggtgggagcagaaatggaggaggacttgggaaagggcgcttgttgctgttctagaagtataaccttgaacatgtattaacttctctggtcctcaggagggccaaaactgagcccttctaggttccttccagttctaaaattctgtgattcagatcagctggggaacatgctcttgccagtgaaatgcatctggagaagggtggttgttccttttcccactgtggtggtctgtgcatctcttcccccttgtgcttaggaagcccaaatttcccatttcttgagccacaaaaatctttcaatatgaactctgtttagagatcaaagcctcacagagtaacagagctgtggccattcttatctgctttttcagtgcaaagatggtctaatgcagtggttcttaagcttttctcatgtcaaggatccatttgagcttatgatgaaactgtggatgctttcaccagaaaaatgcacaataaatatgaaggacaaaaagttgtgtgtaatttccaggtgcccatgcactccctggatccccatcagccaaccttaagaaccattgctctgtgctttgataagagccctgacatctctgttttgttctgagtgaagggacctgcaggtgaggttgagaacagtgaagtagagggcctaaggcctgaagcaccagccctgagctttgaatggtgccaagggcagagctttgttgggttcataaactatactagggtggagcaaagggtgggagaagcaatggaaagtgttttttccagtttctgcacaagataggcattctgcataagtgtttgtcaatccattaacttttatttatttattattttcaaactattaacttttaactcttggttgcctacattacctctggttattctacccttttaccatgcatgccttgaactttttaagagagaagtctatgttttttattagttaccccaactggggtatgtgcagaagagaatgcatgtaaaacaattctcctgaaactatattttttatttttcttgaagtcagtagccccacaatgttttttcatttgtctatttattttgatttcatatggttgttccttccataacctttctttcctaatggcagctggagtttgtggggcagaaagaataaaagaaatcctatgtttagcatctcttttttgggggtaggagagggaagactattaatagatactgctttttagataataataggtaaggccaaagttagaaataaagcatttcattttaaaacaaagtgtttctgctgaacatagtcattcaaggataagggtgtcattctgagggaatgcagatcattaagattggtgcagttatcatgaggaattatattatatttgttttacagtgtagttgcactgaaccacccatgctcacctcagtctgcagttcattttgcagccttagcatgagatgctgtctcttcaaccttctcaagctaaaatgcatgcaactatacacttggtagaatgaacttacctagggaggtactttactttatggataacatgtttttaagtctatgatacaaactggtggaagaaatttctttttaaagttcagatgattgtatatctgaattaaatgtggtggcaatctagctgtattttactttattcccttgggaaagagaaattttatttttgtcagtcacctcttccccttttttctaggattatattagaactctaatgtgattataattattggtaccatttattgactatctactatactatttcaggtactgtgctaggagcttttacctatatcatgttgtatattatcattaaccttactttacagatgagtaggctaaatgtagatgataactttgtagtcttctcagcttaactgttgcgtaggttaaactttaaaaaatttaaggcacagatatttttaatgcacagctgaattttaaatgatgtatctgtgaatcaccagtattggtgaaatatttgcttttaatgttggagagcactaagcatttgaagaaatcaaattctcgtgttgtgtgtcatgctggattcttcctgctctgtcaccccctttatccaggcatttaatgagtcttatacattctgccttttaatttttctcaaatctgtcttcaacattcagtcccactgatgctttcttgattcagggccccatagtgttcctccatttaacatatttattgagggacctattatctgctcagcattgtgcataaatactttcaaagatcacctcatttactcttcttaattccacagagtaatcatttattattcccattatacagatgaggaaactcactttaaagaaatgaagtcatttgtccagcgtccctcagctaataaatggaagaactgagattttcttctagctctgtctaattccaaagcttattcctgttttcactacttgaatttcaaacactggataacaattagcaagcttagcatggtgaagcttggactctggagacagccagcctttggtttgaatcttcgttctgccttttctagttttgtgatgttagctatatatagcagtttcccatcacctgagtgaggtatgttccaaaacccccagtggatgtctaaaactgtggacagtaccaaaccttacatatactgtgatttttcatatactgtgataaaagtttagtttacaaatcaggaacagtaagagattgacaacaataattactaataaaacaattacgacaatattgtataataaaagttatgtgaatgtgctcctactcttgctctctcacaaaacatcttattgtactgagttcacttattttcagaccctgcttgaccataagtaactgaaactgcagaagcaaaaccttagataagggggaatttctaaatctcaatttcttattgggcaaatggagaccacaataataacttacttatagaaatgtggtgagaatttaataagatgatgcatacgaagtttttggtccagtgcctggccagagatgattgatttaaaacattttaaattattattattattattattactagtaattttagaattattattgaagctctttgtgcctgttggtaacaatggtgcctttagaattcagtcttaccaatatgagattcaaaatcttaaatctggaaggaattcagtgtacagctgttctcccaaagaaagactctttttcaaaatctcactgagaaatcccggacaagggtaggacttttagccacttcagcagggaatttttttaaacaatgaatggtagggacctgtggtcataagttttggaactcgtaaaggccctttgcttcttactagcgacctttctgaagtcgactaccacgagatggagcaccgttagtggagctatcagtgtccctgcttgtttctatgcatgggtgtaaagatgccacaacacaggtgtgaacacatggacttcatgtgtttaacaaacatttatggaatgcttattgcaaggccttggctttgtaaggtactgaggaaacaaagttgaatgatacatggtttcttttcttagggtactttagacctgtctttaaagtacttgtagtctgataagagtcacagccaagtcaatcaatgaatgcctggtgataagcacaatttcagaggtaaggctagggaaagtcagggaaggtggggggtagtcaggggagttagtctttccaaaggcctggctagagttcagaggcataagtggaattttgggactttccctctgagatagatgaatgagtatttcaagtctacttccttcaggcatggagcaagtgacctgtatttatatacagtggagttcatggcacaacagtgaaagaggaaaataacttattataaaagaaaaaatacctaacttagctagcacctagaacctgcagttcttgtttttctttaaatcttttttaaagtgctgttgtctttatttggtcttctcctttccttgtctctgtcccactttattttatgcagttaaatactattaaatactttaaaatatgctcattaaaaattttaaaggtatctttacagaaccaaaaccattgtagatacttaattaacactgttttgctgtataaaaggctctggtatttcaggaaaatagcttctaaactttaggtagtaaaatctattcctcagacatgtaatggtttcaccgtatagtgaagtgaatattcaactcatggcctggccttagctgtatgagtttggtgaagacctttacgcttttgagacttaatttccctcatctgtaaaatgatgtaataatacatttcttacaagcttgctgtaagaattccagtaacatagtacatatgaaagtgttttaaaaactgtaagtagctatatgcgtattgacaatttttttaaaaaaataatgtgagacattaagaaaatgtgacttggagattttaacaagttgatttttaaactggggcagtacttgaaatttcatcctgtttaggaaatcagaactaatggattgtacttaatgttatatttagtttaatagccatttgtaaatgtgctgctttgcagaatcatttgcattaatcgtggtgagatatatttggaaggaaaaattagaaaatcaaatttttaccctcagcattgttttcattttgaagtagtgttttttggaaatggagtaaacacaagtagaagagtattcaaaaagtaaaaacatgtcaccagagccttttggcaacttgtcttatttaatgattttgtctgtattctttcatatttcatacacactggaaatctctgcatcataactattaagttccgaaaacattaaaagtgattgtctaaattttggattctatgggctatcaagcaatagctctttttaggcctcttagatattaggccaacggtatgtaaatttagtcattggaaatattcttctaaatcacacctttaagatagcctgaagggcaatcagcatttccattaacaacaaaacaaaaatatgtttctagtaattatcccaggggttttcttttatgacaccaaaagagtcctatcccataaattagcctaaccaacacttaaataatatccttatttaacagaaaaatttaaaggtactttttcctatgtagtcttagaataaaaggtaatatctacttttggtctttgatgatggtgatgtacagacgggtttttggtgtggatgtcctttctctttgttagttttccttctaacagacaggacactcagctgcaggtctgttggagtttgctagaggtccactccagaccctgtttgcctgggtatccgcagcggtgtttgcagaacagcagtttttcatgaaccgcgaatgcagctgtctgatcattcctctggaagttttgtctcagaggagtacccggccgtgtgaagtgtcagtctgcccctactggggggtgcctcccagttaggctgctcaggggtcaggggtcagggacacacttgaggaggcagtctgcccgttctcagatctccagctgcgtgctgggagaaccactgctctcttcaaagctgtcagacagggacatttaagtctgcagaggttactgctgtccttttgtttgtctgtgccctgcccccagaggtggagcctacagaggcaggcaggcctccttgagctgtggtgggctccacccagttggagcttccctgctgctttgtttacctaagcaagcctggacaatggcaggcgcccctcccccagcctcactgccgccttgcagtttgatctcagactgctgtgctagcaatcagcgagactccgtgggcgtaggaccctccgagccaggtgcgggatataatctcctggtgccccgttttttaagcctgtcggaaaagtgcagtatttgagtgggagtgacccgattttccaggtgctgtctgtcactcctttctttgactaggaaagggaactcgctgaccccttgtgcttcccgagtgaggcaatgccttgccctccttcggctcgtgcacggtgcgctgcacctactgacctgcacccactatctggcactccctagtgagatgaacccggtacctcagatggaaatgcagaaatcacccgtcttctgcgtcactcatgctgggagctgtagaccggagctgttcctattcggccatcttggctcctcaccatcatcaaagaccaaaagtagataaaaccacaaagatgggggaaaaacagagcagaaaaactagaactctaaaaagcagagcacctctcctcctccaaaggaaagcagttcctcaccagcagtggaacaaagctggacggagaatgactttgacgagttgagagaagaaggcttcagacgatcaaacaacgagctaccggaggaaattcaaaccaaaggcaaagaagttaaaaactttgaaacaaatttagacgaatgtataactagaataaccaatacagagaagtacttaaaggagctgatggagctgaaagccaaggctccagaactacgtgaagaatgcagaagcctcaggagccaatgcaatcaactggaagaaagggtatcagtgatggaagatgaaatgaatgaaatgaagcaagaagggaaatttagagaaaaaagaataaaaagaaacgaacaaagcctccaagaaatatgggactatgtgaaaagaccaaatctatctctgattggtgtacctgaaagtgatggggagaatggaaccaagttggaaaacactctgcaggatattatccaggagaacttccccaatctagcaaggcaggccaacattcagattcaggaaatacagagaacgccacaaagatactcctcgagaagagcaactccaagacacataattgtcagattcaccaaagttgaaatgaaggaaaaatgttaagggcagccagagagaaaggtcgggttactcacaaagggaagcccatcagactaacagcggatctctcatcagaaaccctacaagccagaagagagtgggggccaatattcaacattcttaaagaaaagaattttcaacccagaatttcatatccagccaaactaagcttcataagtgaaggagaaataaaatactttacagacaagcaaatgctgagagattttgtcaccaccaggcctgccctaaaagagctcctgaaggaagcactaaacatggaaaggaacaaccggtaccagccgctgcaaaatcatgccaaaatgtaaagaccattgagactaggaagaaactgcatcaactaacgagcaaaataaccagctaacatcataatgacaggatccaattcacacataacaatattaactttaaatgtaaatggactaaatgctccaattaaaagacacagactggcaaattggataaagagtcaagacccatcagtgtgctgtattcaggaaacccatctcacgtgcagagacacacataggctcaaaataaaaggatggaggaagatctaccaagcaaatggaaaacaaaaaaaggtaggggtttcaatcctagtctctgataaaacagactttaaaccaacaaagatcaaaagagacaaagaaggccattacataatgttaaagagattaattcaacaagaagagctaactatcctaaatatatatgcacccaatacaggagcacccagattcataaagcaagtcctgagtgacctacaaagagactgagactcccacacattaataatgggagactttaacaccccactgtcaacattagacagatcatcgagacagaaagttaacaaggatatccaggaattgaattcagctctgcaccaggcggacctaatagacatctacagaactctccaccccaaatcaacagaatatacatttttttcagcaccacaccacacctattccaaaattgaccacatacttggaagtaaagctctcctcagcaaatgttaaagaacagaaattataacaaacgatctctcagaccacaatgcaatcaaactagaactcaggattaagaaactcactcaaaacccctcaacttcatggaaactgaacaacctgctcctgaatgactactgggtacataacaaaaggaaggcagaaataaagatgttctttgaaaccaatgagaaaaaagacacaacataccagaatctctgggacacattcaaagcagtgtgtagagggaaatttatagcactaaatgcccacaagagaaagcaggaaagatccaaaattgacaccctaacatcacaattaaaggaactagaaaagcaagagcaaacacattcaaaagctagcagaaggcaagaaataactaagatcagagcagaacggaaggaaatagagacacaaaaaacccttcaaaaaattaatgaatccaggagctggttttttgaaaggatcaacaaaattgatagaccgctagcaagactaataaagaaaaaaagagagaagaatcaaatagacacaataaaaaatgataaaggggatatcaccaccgatcccacagaaatacaaactaccatcagagaatactacaaacacctctacgcaaataaactagaaaatctagaagaaatggataaattcctcgacacatacactctcccaagactaaaccaggaagaagttgaatctctgaatagaccaataacaggatctgaaattgtggcaataatcaatagcttaccaaccaaaaagagtccaggaccagatggattcacagccgaattctaccagaggtacaaggaggagctggtaccattccttctgaaactattccaatcaatagaaaaagagggaatcctccctaactcattttatgaggccagcatcatcctgataccaaagttgggcagagacacaaccaaaaaagagaattttagaccaatatcctttatgaacattgatgcaaaaatcctcaataaaatactggcaaaccaaatccagcagcacatcaaaaagcttatccaccgtgatcaagtgggcttcatccctgggatgcatggctggttcaatatacgcaaatcaataaatgtaatccagcatataaacagagccaaagacaaaaaccacatgattgtctcaatagatgcagaaaaggcctttgacaaaattcaacaacccttcatgctgaaaactctcaataaattaggtattgatgggatgtatttcaaaataataagagctatctatgacaaacccacagccaatatcatactgaatgggcagaaactggaagcattccctttgaaaactggcacaagacagggctgccctctctcaccactcctattcaacatagtgttggaagttctggccagggcaattaggcaggagaaggaaataaagggtattctattaggaaaagaggaagtcaaattgtccctgtttgcagacgacatggttgtatatctagaaaaccccattgtctcagcccaaaatctccttaagctgataagcaacttcagcaaagtctcaggatacaaagtcaatgtacaaaaatcacaagcgttcttatacaccaataacagacaaacagagagccaaatcatgagtgaactcccattaacaattgcttcaaagagaataaaatacctaggaatccaccttacaagggatgtgaaggacctcttcaaggagaactacaaaccactgctcaatgaaataaaagaggatacaaacaaatggaagaacattccatgctcatgggtaggaagaatcaatatcgtgaaaatggccatactgcccaaggtcatttatagattcaatgccatgcccatcaagctaccaatgactttcttcacagaattgaaaaaacttgatcttgaaagttcatatggaaccaaaaaagagcccgcatcgccaagtcaatcctaagccaaaagaacaaagctggaggcatcacactacctgacttcaaactatactacaaggctacagtaaccaaaacagcatggtactggtaccaaaacagagatctagatcaatggaacagaacagagccctcagaaataacgccgcatatctacaactgtctgatctttgacaaacctgagaaaaacaagcaatggggaaaggattccctatttaataaatggtgctgggaaaactggctagccatatgtagaaagctgaaattggctcccttccttacaccttatgcaaaaatcaattcaagatggattaaagacttaaacattagacctaaaaccataaaaaccctagaagaacgcctaggcattaccattcaggacataggcatgggcaaggacttcatgtctaaaacaccaaaagcaatggcaacaaaagccaaaattgacaaatgggatctagttaaactaaagagcttctgcacagcaaaagaaactaccatcagagtgaacaggcaacccacaaaatgggggaaaattttcgcaacctactcttctgacaaagggctaatatccagaatctacaatgaactcaaacaaatttacaagaaaaaacaaacaaccccatcaaaaagtgggcaaaggacatgaacagacacttctcaaaagaagacatttatgcagccaaaagacacatgaaaaaatgctcaccatcactggccatcagagaaatgcaaatcaaaaccacaatgagatatcatctcacaccagtttgaatggcaatcgttaaaaagtcaggaaacaacaggtgctggagaggatgtggagaaataggaacacttttacactgttggtgggactgtaaactagttcaaccattgtggaagtcagtgtggcgattcctcagggatctagaactagaaataccatttgacccagccatcccattagtgggtatatacccaaaggactataaatcatgctgctataaagacacatgcacacgtatgtttattgtggcactattcacaatagcaaagacttggaaccaacccaaatgtccaacaatgatagactgaattaagaaaatgtggcacatatacaccatggaatactatgcagccataaaaaatgatgagttcatatccgttgtagggacatggatgaaattggaaatcatcattctcagtaaactatcgcaagaacaaaaaaccaaacaccgcatattctcactcataggtgggaattgaacaatgagaacacgtggacacaggaaggggaacatcacactgtggggactgttgtggagtggcgggggagggagggatagcattgggagatatacctaatgctagatgacgagttagtgggtgcaatgcaccaacatggcacatgtatacatatgtaactaacctgcaccttgtgcacgtgtaccctaaaacttaaagtataataataataaaaaaaaagaataaaaggtaatagctgattaagtttagagaatactgattcttatcctttttcttcttctaccatttcctagttcggcaaccatgcaaagaagcgagatttagaaatggaatgttgaggtgtgtttaagatggtatttgtccaggctattcaggaacacgcaagccctgtcctcagctcaacactctctccagaagatcatcggagaaatgtgtacacagagaaacaaaggccaaggaaccctttattgttggctgaggttttgtcttcaaacccagaagcagaacactggtaaactatatagagccttctgcttcagaatagcctcgcagcaaaacaggctggtggttgtactaggcttgctcttttacttgaaaccaaacctgaaccatgagtcttccttctcttctacagtgaaaggctagaatatagctttcagtgggaaaaactcctgtcttgtgtaaaccaaaaagtatctgagacaagtctcaatcaatttataagtttattttgccaagattgaggacatgcctgtgacagcctgaggcggtcctgacaacatgtgcgcaaggtggtcggctacagcttggttttatacattttagagagatgcaagacatcagtcaatacatgtaagatgtacattggttcagtccagaaagcaaggaaaactcaaagtgggggtggatggtggggcagggagatgggcgtccaggtcatagatggattccaagattttcagattggcagttggttgaaagagtttatctaaagacctagaatccatagaagggagtatctgggttgagataaagggttgtggagaacaagtttcttcttatgcagataaaacctccaggtagcaggcttcagagagaatagattataaatgtttcttagcagacttaaaaaggtgccagaagatcagggaaaagacctggaaagggaaagggaatctctatagaatgtcaattatcctcacaagagatagctttgtagggccatttcaaaatatatcaaaggaatatattttagggtaaaatacttcagtttctttcagggccttctatgtgccatatgatgctgtactaaagtaaggctggaattttttttattgctacaataaaactcttttattgctacaaaaagtcttaaaatctctgtttcaatgttaatgctggtcacttgtgtatgaattccatggggaagagggtataatgaggcatgtcttacccctctcttcccatcatggtctgaactagtttttcaggttaactttggaatgcccttggccaagaggaggggtccatttagatggttgtggggcttagaatttttagtttacacttgatactcgaaacacagctggtgtaggataattgtcttagaattcaaaaagttcagataagccgcctacttccccatgtatggaataagggggatgctgctcaaaggtgtggggagggtggagataggaacagccttctattaaccaaagaagccaattgtaggcaacgtactagtctctaaccatcatgctctcagatttccagagtttgatactgtgtgctccacatagatatgtatagttcttggtaggtgaaacctatttcaaaactgtcccagtgataaattttcacaaggctgtctttgatggcttccttctacatcccagcccttgttggaggctaattttaacctaagaaaaatataattgccaaggttatattatatttatctaaagtaatggaatattagagtttgattaccattggagggtaaaggcaggaagataccaactcagacatagcttgggtgtggtgtgtacattcctataacttctaatctttataaaaatctttatgagttacagctgtaaaatatggttgtagtttttcactgtcctttattacccttaagtattccccaccaagggagtgctacatatatgccatatttgcagtgaaataagaatttattaagaaatacattgtagtatgttttattaaagtaaaacacacatatgggtatgcatagatagatgcaaaaatcatgtttacttgatgatttttcacaatgtgaacacacctatataattgtcactcaaattatgaaacagaacatgagcagtgttatatatttgtttttaaattcattaatctctagtttttattttcttcttttgctttctttgaatttaatttgctgttttcttatttgttaagataatatatttagatcattagactttagcttttctttttttgtaacattgacagttaaggcatgaatgttactgaatgcatgtttgcagcttcattccacaagttttgatatgtcatgtgttcatattatgagtaatattgactttaacaagtcaatgatataatatttttatctctaggacaagtattttgttttttaaatggattccatttaaattcccatcttgaaatcaatatttaaaaaatatgatgttatttcaaagtctgtgtctgataaccatagtatataattctcctttaaggttatttctaatttctgtttttaccccctcttgggattccagtcatttgatcttgtcttctgttatgtctaacaacttctgattaaatgtcagatataaaatatccatagtagagataattttatactctagatgatattatcttccttcagagattgtatttgcttttggctggcatttgggttaggggcaggtcaccttaatattcagcctggaattaagctgattggaagctgaatatagttcaccaagtgcataggcttacaaccatccacacagaatctgaatcttgggattcacagtctcagagatacccgccatgatagagaaatatagttgggcctatgaaacagactccgagtaaacttatctaaccagccacatagatgaagatgtcaagtctgtttttttctatttaattgtcttactgtaagagaaagaagtcagcttgcttcctgtcttcatgacactttaattttcccattagaaagaaagtccccttgaatttatcaaactctaattcatcaaattggccacattccctgaggtgcagagaagaggaataaataggcagaggccggaacctggtaaggtgagagaacacttctttctaccttaagagttaatattgttgtttgcatatggtaaatgaataaattcatagtcagagagcataaataacctactaagatgctgttagacctgggctctcccttacacttttgagtttcttggatcttaagattctacagtatgtaattattttctaacactattattttcagcactgcctaaaagccagtctcagtgagatttaaaggcagggtggccataataattttccttttaaaccaagacatttttgagaatgaaaagaggtactattagtcattacgccaggacaatagggtaaactgggactgttatgggccaactggtaggtatggtgatcttactttactactgatacagataccttctgcaatggaaggtcgtggaattgggtgacgttgaatgattctgagcttaccacatgagtttgtttgaaaaataagagctgaaaatacccgaagacaatggaagggtgggggacaggagaaaattagcaggacgaagagaaaataaaccaagaagaagaaatgaagagaggaaagaacaataagaatgccagaaatcagatatttgcccaggaaaacaggtgaatgttagcatgtggacatgaggcagggtaaatagaaaacaggtacagatttgaagattaaaatcatcatggaggggaaaaaataatgtatagaatgagatagcaatgggtataagctttgcaaaaagaacgagaaagtatactcaagtttagatgatgttataatatcatttatagcaaggacattgaagagcctacaggataacattctagtaaattagatttaaaggacaaattgtgagtattcctggttataaataacactttattattgatgcaattattttaacacatgcagaaacatggcagagaaaaggaggtagtgtttaaatatctgcccagtgactgaggaatactataatatcctggatctacaggtgatgctgcaggtctgagagcaatggtaaggaagctaggaggacgtaatattaatgatatgattatcccacccatatagataacctaaaatatgtgaactgctttcatagaaggcagaagaatccaagacctgagtggagtgtgaaagattgaactttaaaaatagctatgtgtgatgcatattacttgtgtatgaataacttttccatcatcacatagaactgtcatctcaggttaagcgacctcttatgctaatactgtgatagctgggttgttgttggaaaaccactcagaaaataagaaaggttaaaaaaaattgtaagataaaacatttatagcagaaggcaaaatatatacttctgagtaactatagcatcactatactctggaagaaagaatacaggctagtgtaaaaggaacctggaatgtaacatctggattcacagagctgatgttaatagcctggtaaagacaaaagatcacaaaatcagtgaactagtcaaagtatttttgaataattgtagtaccacaaggcagccatttaaaattcactcctctgaagcctaggttggctaaaggaatttttgtttttcactctgtgtgttcttgtagttgaccctgcataaaatccaggctggttattttttgaagaaacaacttacaatctataagaaaggaatgttcaacttcaccataggaattcagtccaaatgcatttattgagcgatatcaacctgatatgaaagccgtatattctattcttgttttatcttttattgttctttatattttctggtcctatttacctctttgtttaatctttacattttttctagtactttattattgttcacagtttattgtgtaagcctagaattggttttcatgctttagccattacttttcctttatgagatgttattgtacttggaaaagataatgtgtgaatcagtgtttgatgagccaaaattatgggagagatttttaaactttgacttagagaagaaccttttttgaactctgttactaggtgtgattggtgtgtcttgtgacctcccattggacagtgtactttttatatggtatttatgtttcttttttcattgcagcattacagggtgtctgttttctacagtgccttcttattactaagctttgaacattgtaggcacccataaagtctgaggacatttaagtacatttgagagtaggattagatggaagatgagaaaatttccatccaaagcagaattttctaatctgattctgtatcataatgtgctttatttatttcccagtgggatataaagcattcctaggtatactaaagtttccaaaaaaaaatctgtagtacagacagttgtttaatttcatttaacctgctgttcctcacatttatctgacaaatacacttttgtatctgggctctgcagtagacagaaatgcacctcaaattaattgaagcccaaaaggggatttagtggcttatgaaactgggaagaattcttggtgagttcacagaacagacaagctgcaggatgtcactgactgagactggggactcaacagtctttctcttcatccattttcctcttttgattctgctggtttcattttgggtgctgacctcaccctttcctggtgtggacagtcctgtgccctttcaacacgacggggaacaacctcagctgaaagggaacatgttgatttctacacttctaaatattgatttttccaaaaggtttcatccctgtgattggcctccatgctgtagaccaaccactcttgtcaggggaggagtttactaagattggctatatctaggtcttttgtccacatatgtggcctggataggatgtgtagaacccacttctttaagaagagagttaggaaggcttgttgggaagagcagaaataataaccatcactcatcattcaacaaatatttattgaacgtttttcctcagcccctcaggcacttttctagacattagggacctaacactgaacaaaataaatgaatattccttcttccagggagcttacattgcagtgtaataaaaaggcaacattctaataaaaatgaataaaaatgataaggaaaacagtatgtttgactacaataagtacaaggcagataaaataaagcagaagagtaagaagtatctgtggggagaagggagttaaaattttagtgtgtccagggaaagcctctctgatgagaaggtcacttaattaaatattggaaggaagtgaaggagggagccctgcatatatcccattcagaggacacagcagatgtgaaggacctggggcaagtgtgcctggtgtgtctgaaggaggacatagagagtagaatgtgggcatggagaagaccatggaggacatggagggtagagtgtgggcagtaggttccagatttaacctttaaaatccgaatttttgtgggcattttatggtcttctggtctgatttctagtgctacagagtccattccttcataatatttattacagctgaattatgtgcagagctgctgttcaggcaccacacatttttattttagaatagctattggtttctcttagctattgccttaaaatatatacttctaattttttagtgtgggtatagtgattgtagtactggtaaaatgatttatggaagaatataatctactgtgagataatctgcatgtgttgtgaatcaggtagttgctgtgacaaatccagtcagtaggttccagattgaaccttaaaatcctcacttcttttgggcattttatggtcttttggtctgattttagtgctacagagtccattccttcataatatttattacagctgaatgatatgcaaagcaaatgtttgatacagtggagaatgaactgatcttaccttgtgaaacttggggaaaagacactttggcaaaaatgtgattcagaaatgagcacttatgaagttcccaaggaattgggctgagatagtaggaagtcttgtgctgagctctaaaggctgtttataaaaagcagacgtgaggaaaaggcaatttttgataagaagtgtaggagtgtaagtatataaaacagaagaggattatggtcaggtcacctgcctaactcgagcaaggagtctgctagagaaaatgggaagtaaaatcagattattagaaagctttgtgttctgtgttaataacgggaactctctctggagagagtttgaggaagattattctagaaatgttgtgtcactttgggccacttggccatattccacactctgctctgtgttataggggacaatttataattgcaacttccttaggtaataataacagtcttggcaacttgatgtttttttaggcccttcccatggatattcttttcatatctgtaagatgtaaatttttttaaaaatattagtatttcttgaaggattaatgggagaaactttggaaaattccctactgcttagaagtgattttgtttgtagcatgtaagatatatataccttctctttgcttttttttctttttcctttcttggtttccactaaattcttagccctaagttccttgcttttttgtctcagctttcttcttatatgaagtatcaaatttaaaaaaatctttaaaaagcctacagagggtgatggagcttagggattagttctcatgccacttattttccctaattaagaactctgaaatggaagttgaaaatgttggtataacctttttattaatggggaaatggggtcatgcctgccacttccatctccacaacaatccattgtataaaatgttaagttcactggtacttttgatttgaggggagagacatttatattggataagtatatatcagaagtctgtgtcttttgaatggtcttccgaaattcttatctccattcttctataattgttgaattattttccttaagctgtactgcagaataacacctataagataagctttcaaagtgactgtgttaagcagccttcattctccaagaaaaccactttgtgccttcttttctcaaaacctcacacaacttcctccccctcaccattagcttactagtatttcactgcaaaaataagtcctcagaaacctgcatcataatcccgccaaatctcccaatcacccccattagtctcatctagtctgccttccctagttagtattgataaactctgtgtgttcccatctaaagctaacttttctgcctgtgatttggatattgtctcttttcagtagtttaaagatacttaaactgcttctgcatttatcccctatctctcctgcagcattaacctgtctctactagatcattctcacattccaaaattgctgtaatatctgccataaaaaaaagaaatctgtaaatttgtttaagtttcttgtagattctggatattagccctgtgtcagatggatagattgcaaaaattttctcccattctgtaggttgtctgttcactctgatgatagtttcttttgctgtgcagaagctctttagtttaattagatcccgtttgtcaattttggcttttgttgctattgcttttggtgttttagtcatgaagtctttagctgggaggcaggaggaacttctctaagactcaggaattctacttttagttatacatattaaacaatctcaaatattgaggtcataaggaaaatattataaggtgttcattccaacactgcagagatatttataactgccaaatagtaggatgtataagttgtggtatatttatacagtgaagtagtatgcagcccttaaaatgaatatagtagagctactttcatcagtgtggatttctctcaaaagcataatgttgaattagaaaagcaaggtaaagtatgatgcattgagtatgatactatttataaagagcttgaatgcctgagaaacaatactatatcatgtgtatgcccatacacatgtataatacattttacatgataattataaacactggttttagaaccctagggaaaaagtgaaggaaatggagttgggatgtactcaactgttggtgtgggatgttttttctttaaaaatgaagattgaaacaaacatgacgtaagggtaagatctgataaagttgagtggttgatacacaggaatttgttattacatactctattttacagctacttttgaaatttttctcaggtaaaaagtataaaactaacataatacaacaatttttaaaataaaatgattgctaccaaaaaacaacaaaaaaaacccttcagactggtagctttaaacaactttaaagcttgagctccttctaaatttcccaaagtctttcagcactctctttcaactgggcctcctcttcagaagtcacctttatctttataagatctgtagtactattctgtcctaggatacaaggaatgctaaggaatgttacttcatttatcccataaaagctctcaattatgatggaaactggatgcaccctcttaagattattcaaagaggaagtcaaattgtctctgtttgcagatgacacaattgtatatttagaaaactccatcatctcaggcccaaatctcctcaagctgataagcaaattgagcaaagtctcaggatacaaaatcaatgtgcaaaaatcacaagcattcctatacaccaataatagacaaatagagagccaaatcatgagtgaaatttcattcacaattgctacaaagagaataaaatacccaggaatacatcttaaaagggatgtgaaggacctcttcaaggagaactacaaaccactgctcaacgaaataagaggacacaaacaaatggaaaaacattccatgctcatgaataggaataatcaatattgtgaaaatttggccatactgcccaaagtaatttatagattcaatgctattcccatcaaactaccactgaatttcttcacagaattgtaaaaaactactttgaagttcacatggaaccgcatatccaagacaatcctaagcaaaaagaacaaagctggaggcatcacactacctgacttcaaactatactacaaggctacagtaaccaaaacagcatggtactggtaccaaaacagatatatagaacaatgaaacagaacagaggcctcagaaataacatcacacatctacaaccatctgatctttgacaaaccagacaaaaacaagcaatggggaaaggatttcctatttaataaatggtgttgggaaaactgggtagccatatgcagaaaactgaaactggatcccttccttacaccttatacaaaaattaaatcaagatggattagagacttaaatgtaagacctaaaaccataaaatccataaaagaaaacctaggcattaccattcagtacataggcataggcaaagacttcatgactaaaacaccaaaagcaatggcaacaaaagccaaaattgacaaatgggatctaattaaacagaagagcttctgcacagcaaaataaactgtcatcagagtgaacaggcaacctacagaatgagagaaaagttttgcaatctatccatctgacaaaggactaatatccagaatctacaaagaacttaaacaaatttacaagaaaaaaacaaacaaccccatcaaaaagtgggcaaaggatatgagcagacacttttcaaaagaagacatttatgcggccaacaaacgtgaaaaaaagctcatcatcactggtcattaaagaaatgcaaatcaaaaccacaatgagattccatctcatgccagttagaatggcgatcattaaaaagtcaggaaacaacaggtgctggagaggatgtggagaaataagaatgcttttacactgttggtgagagcataaattagttcaaccattgtggaagatagtgtggtgatccctcaaggatcttgaactagaaataccatttgacccagcaatcccattattgggtatatacccaaaagattataaatcattctgctataaagacacatgcacacgtatgtttattgtggcactgttcacaatagcaaagactgggaaccaatccaaatgcctataaatgatagactggataaagaaaatgtggcatatatacaccatggaatactatgcagccataaaaaaggatgagttcatgtcctttgtagggacatggatgaagctggaaaccatcattctcagcaaactaacagaagaacagaaaaccaagcactgcatgttctcactcgtaagtgggagttgaacaatgagaacacatggacacagggaggggaacatcacacactggggcctgtcagggggtcaggggtcatgggagggataatattaggagaaatgcctaatgtagatgacaggttgatgggtacagcaaaccaccacagcacgtgtatacatatgtaacaaacctgcacattctgcacatgtaccccagaacttaaagtataaaaaatacttttgcactaacctaatagtaaaacatgactagattaatcagctcatacaatgtgaattattgaccagtatgaaacagagaccaaagtcagtgctggctactacttaggagatgcaaagataattcctctgatggatttctagattcatttaattgcttaatgacttagagataattaattctcaacaaatattcatttgaaataaattctgacaagttgtccataatccttccagaattcagtaataaatcaaatgcaccttttttttttctccttgtaacttcccattgacagtgtcatgtcattaaaacccaggctatgtgtggctgctctttcccactgcagtgaaagacatttcaatgggaaatgagtttgcctattaaaaaatgtttactgttgttttctattaaaaaaaaagattcttcaaaatactttctgttaaatcagctacagataggccaatggtccaattagtacaacctttcattttaactatctcatagccacaggcaatcacttctttgtggactttttcccactgttcaggatctttatcagttcctatatctgagttcagatccgtcagagggatgccagcaatattgactccactccacacaggaatacttgagtccctatgctgtccaagaatccacctatgacagctttcagagtggatatcaagcctttgcccagtgaagaaacggaaatggggagtgtccagattacagccacttccaataacacggttttggggaaatacactcaatttccagaatacataagttacaatatccagtaaattagaaactactatcagtttgtggtggggattgcatcgggtaatactggaaataattaatttaaaaatgatcacatttcactggactatatcaaggtgtgtttctccttttgctggaacacctgctgtaataatgactaagttggactttgcagtgacactgtagtctttgctgaaaacaatgcttggcatttttatggaagggctgccatgttgaagatccgttgtctcacccttcaatttgccttcgtcaacatccacaaaggcaagtttatcacccaaaccttttaataagatgctgagagcacaggccatgccaactgatccagttcctataatggagatcttattgggatgagcggccccctccaaagtgaaattcttggcaagttcaagcttgacagtcaccatcttggaaatgggagtgaaggtccagccgcccctgagtgggatgtgtgtggcctcgtgggggcactgagccagcccccaacaaaggaaatgagctcctgcagcacctattctcttgctggtgggcagaactcctgcagctcagctcatggtcgttagctcacgcaagaggcaaatggatgaaagcagcggcagaaatctccttgaggtgtggaagaaaccctgacggtttgaaggcctcctcgccctttgctactgtggctgcgcaaggccactcccagctcgtgcagggctcacagagacctggccccttaatatgttatttttagttttacaaatatgtggtattttttacaccattaagacggttccgaaaaaatggactgtgatcattaaggccaaaagtaattttagctttgcctttcaaagtgccatattttgttgcttagagaagcgctgcacctttgcaattatttttgtcatggtgctcaaacacgctgaaactaagtacgatagatgcaaagacaaagagatgagaattccaatctccactccacacttggactttgaagaagtttgactatgtgagcttcttttaaaaagtcaatattacaatgtgataataagacttgtcctaactactttacaaggttcctgtgagaaagtcagggtgaaaagtctagggagctttaaaaagagtattgtaactatttgacaaactatgtcactgagtcagtgacaaaaccaagtcttctgatttttccttcttcatgaaaatgatgcattaaaaattaaagaaataaaagcttagaagtcctcaattatctgcttttttgaagataagatagtcatggataaatgcaatcattcgataactagtaatgtttagataatctcaaatccttctaccagaactttaataacatttattcaaaatcaaatatctgcctctttccccaatcaccatctcctttataattaaaaagtgaggactatgaaaaacaagaaggcttaacccatgaattaaaatgatatttctctaatatactgaaattttgccttatgaatggttaaactacattttctttaagttggcaagtcttaatatgtgtttacctatttatattatcccaaataagaaatttgatggaatcttttcacttctcaaccagttgtttaatatttggtatcaggatgcattctatttgtaaatataatagttctatctcagaaaaaaaaaaaagaaagaaatctattttattctctcctcccctagcttccccatttctcagctttttttgatagcaacatttctcaaaacaattatctttactctctggtgtccactgtaacagctcttgtcaagatccccagccagacacagtggctcacgcctgtaatcccagcactttgggaggctgaggcgggtggatcccgaggtcaggagttcgagaccagcctggccaatatggtgaaactctctctctactaaaagacgaaaaaattacccaggcatggtgatgtgcacctgtagtcccagctactcaggaggctgaggcagaagaatcacttgaacccgggaggcaaaggttgcagtgagccgagatcgcgccactgcaccactgcacttcaacctgggcaacagagcaagactctgtctcaaaaaaaaaaaaaaaaaaaaaaaaaaaaaaaaaaaagaaaagaaaatccccagcacctccatcttgccaaatttattcgtccattcttagctcccatcttacctgaaccttcagcagcctgtgatttaactgattcactctccttattgagctgtttcttcacctggctactggtgaagtcttggttttcctcccctttttcagtgttctctgcctatatcttctcctattcctatacaaattagggtgacccaggacttaactcttacccctctgctctatctacactcacagccaggattgtgccatcctttcttatggtaccaaatactgtttacatggtgatgtctctcaaatttacgtcttccctctccgtctttctgcttgggcttttggtaggtaattcctgcctaaaacttccaaaactccttattgtagcctattgggtcctacaatctggttcaccccttacctatgcaacttctttgcctgctgttttctctcctttgttccttcagcttccaccacatttggattctttcttatcttgtaactgccaagcagcttcttctcacaaagtctttgcatttcccattcttttggcctagaatgttctttcctccaatttttgcatagcttgtatctttactccagtgtcaaatgtatttcttcagaggccttcccctatcaccctgtctaagatagtaccttttttacttgttttatttttttttcttagtacttatcagcactttatattttatttttcctctgtggtaatatgagtctaaagagggcatgtaattaatctatccacccctgtttccctaaggcttatagtattgcctggcttatagtagattttcaacaacttttcgttgagtgaatgaatatataaatgaatggagttgtatgatacattattgttttatatgtaaaccatgtgattaatccctcaatatttttgaattcaaggtacagataaatgtttactataatataatgtttaaacataatgtaaaagtggctagctagaacatgttgcatgtcaatttgtaaaaaggaatttcctgtgagtgatacatgggaaggccctttttgttcccttctctggaactaatagtaattccacaggaaccttgtggaactaaattgtgtttccttggttcttctcatgcagctgaagaataagttcatgaaaaaattgccacgtgatgcagaagcttccaacgtgcttgttggggaggttgactttttggatactcctttcattgcctttgttaggctacagcaggctgtcatgctgggtgccctgactgaagttcctgtgcccacaaggtaagctgctctcctacctggggtctacaatgtgctaatagggttatctcctcccattcaggctggagaatcaatagaatgaggaaatatttagtgcaaacacattggagaggtttaacttgaaataatgactgtttgacttttatactgtcaaatttcttggcacttatatagtaataataatagcaattataatagtttattgggcagtgtactaggttcttcttttggattattctacttaatccttacaataatattttaagggacaaactatagttatctggttttacagatgaaaaaaggtctaagagtttaagtaatttgtccaaggtcatacagttagtaaatggttcagaggtcatagttgctttcatttactctgttttatcagaaaattggtagtaggtttatacacacatatatatattaaaatcatcaagctgtatacttaagtttgcatacttcactattaaatgttgtgtcacaaatttttgttttaaagtgaagtatattaatgttattataatcacgtactcatttcactgcatagtacctgagaagtcatcctcttcatccgcctctgaaactgagctccacagagttaggaagcttgacctgggagtgcaattagttgactagaagttaatgtttcacttaaatttgtgctgcagacagtttaaagaaaacttgtagtcttcaggttgacagaaaattaaaatatgaataggacttttttttgggatggggggtgggggagttgttttctgtgggttccagggcaaggacaggttcctttaggtttcctcatgtgagcaggaagggctatgaatcctcctcagtgatagatggatcctcctcagctcagacggtctgagcatgattaaccaacagtgtaaagaggctcaagatttctttagagcctggttaggaggaaaattaagagaaaatttcctttaggcttcttaattcatagattgcaggctattcttcctcatcatacaggtattttttaaacccatttttatatttcttagacacttaaaataggaatgatacatagggctgttattggacaaatagcagtggaaaagagatgatcatagcttattcacttaataggattatgatgatttgtgttttctgtaacgtagctttttgcttgaaaacattccagcagagccttgtggttctatctgtgcagtcacctggcgaacagctgactcagataatggctggagtccagctctgtgcccctatggctttatttatgtctctctagactaactttactaggggttgaaagaaaaaaacatgcccagaagtgttaaagaaaattgctcttggcttttcatttttattaccatttttctttagaaggtacaaataaaaaatgctttaaaagacttttatttaacaaaatacgcattcattgagagcaaatcatgaccattttttgtgtcctgcttatcatttctttctgtctggctcactaacttttttcttttataatggatggtagggctagtgtagaggtaaaatacagcatcacttaaattagcaaaaggagccaggcaattcaaggcaacgtaattcaataatattatataactatttcagggcaataatctgaacgatatatccttgcatgttaacatttttccaggaaatagcttcatccatttgctgtcctctgaactagtacaagccttaatcactgagtagggagtctcattagctttttgtgtgtaggtaatgtggggtcatttacagtggctgcatcctgtgaaatccaataaaggaaatcccacaaggaatgtggtaggcatggtgaaggactgcatgtacatttcatgatatgttttaatgtgcatgctactctatcgtactgaaaggaaacctgaaaaatctgtgtttgtgtgtatctttttatggtcatttttctttttaaaggtggaggaaagttatgctgccattattatgattatttctgtttctaataaacagtattactaccatgcaccttctaggaaatatggctctagcagctcccatttcttgtgcggagttcaccaatttcattatttactctcttacttgcttgatctgttttagcctccacttacagctggatgactatcaaccgggtgaatgtctatctatgtaggggcccctcttgccattcatgtgaaaggaaacaaaccctattctttgatctttggttactggataggatatgtttatgattttcctagtatcttacaggcactttgcttgctgtcatcttatgtctatccacagaggccactactctctctctctctctctctctctctctctctctatatatatatatatatatatatatatatatatataaattttttgaaggggggtgatagagtcttgctgtgtcacccaggctggagtgcagtggcgtgatcttggctcactgcaacccccgcctccctggttcaggcaattctcctgcctcaacctcctgagcagctgggataacaggcacctgccaccacacccagctaattcttgtatttttgtagagacggggtttcaccatgttggccaggctggtctcaaactcctgacctcaagtaatccacccgcctcggcctcccaaagtgctgggattacaggcatgagccaccgtgcccagcctcattcatatttttgagctatataggggatgaatgttcttcttataccattttgcagttgagagatgaaggcaaagggaagattcagcatcagtgctgggaatagaactttaaatagatttctgaatctgagacaagagttttagggacagcctagggagattctagaaaagattggaataaaatgttttagggttctcttataaagaagaataaaaccctagtttgtgcttttctaatcttgatttgcacatgtaaggtaattggttattaagtaagctccagactgttaaaaatttagaatgtttaccctcttagtggcactgtaagataatatatatatgttacaaataattatttatctaaaagaagtagtttgtgattaattgtcaaagccattaaaaaaacttagagggattgggatggagatcctgctagttcaattttgtcacatccaccagtttaattgctagctgctattaatatttaccgcatgtaatgcagttggttatggtgggtttgtggtcctcatgaatccattatggaagccacagtttagccacattttccaaagctgataaagatgaataatgggttattgaattcactgttgttttgagagaaggatataaaggattggtacatgctgagtttatgctagaaatagctgtgatgtatcaggaaagaggggggtgcatatcttttccgaaaacatcaagtggtttaggaaggctagctccttttctcatattatgctctgtttctgcttataattattttgtgaatgtgagtataggccgttggttccggacacagattatttggttaatacatccttttgttgtggagaatgctggaggcatcttccgcaggcataattaactatatgaaaaaactcagaaaagtagaaaagggcctcatgaagattattcagataactagacgctattaaaaattgtaactctgacttatttatttatgagtgaataaaaagaacttagtaacataaattaatgctttttttttccaagctgtcaaagtaggctgtgcccttgcagccacacaaatgtgatgtttactctaatttgttaatagagaaaaaagcttctggataaaaataacatctgtccattgacaaaaaacagcttgggtcatgaaaggagttttcagtacattataaaagctgagtttggcaggatgtacttcaatcataaaagttgtaacagctttcgcttctttgaaggttaaaggagagaaaacatatttcaggcagagggaacttcaacttgttggattgttttgtgttcagttttctcggatttctcatcccatttcaataatgcagtccagattagaagcttcttaaaggtgtccattcctccagatgacatttttggcttgaggttatgtttcctgctgcttatgaatgcttggattctctctatttatcattttaaggaggcagatttactgaattattcctgattggagtaatgtgaaaattttaactggtatgtccaccatgttggtttggcccttggtgttattccattaatgaagaaataccttctttaaaaaataaaaattgcattacccaggaaagaggaatactacttttatatctgtgttactgaaccaatataattctcatatattgtgtttattgctatcgtgtagacaccattgatctgctgcttcctttcattctttgactggttctatttagcagagaacaaagagtaaatattttatagaaaatgtctgtcctcgtctcataggatgtaacttggaggctccattactctatcagctattggaatacccactgcctgccaaagtttatgtttgaggactattaatgactgagaatgttttttcactaactagacaatgttttggctttgttgctatatagtcaacctgataattaactcattatcagtgtcagttgataaatacatttccataatatgtatttgtaagctataatcatgatggaggtgctagggagaggtaggaagagatacagagtgtttggaaaagttttggatattatgcattactgaaaagttaatatttagatacatgaagataataaaaatggaagcagaagaaatctattatttaaaaatgtactaaggatccaggtgttagatattttctcttgtggcacagcatctgccccttttcacctaaacccacacccttattgaattgaaacatgaccatctgtagtcaggcaaacgaaattgagaaatgtgaccagtacttatgtttctcaatgggattaaagcattattttgctttaatcattaaatatattttgtgcatgttgcactcaaatcagtgatcagtccctttagaaaaatacactttacagtcctaaagaagcactttataatactatacgtagtggcatataattaggggccagcttcgaagggacaaaagttctagtgtcaattgaacttcagtgttaaaagagctgaaattcaattcaaataatgacttccttcatacttgaacagactttggtgcctgctgattgctatctactttggtaacacttgaaagtgagtgtgctgcttcacttcagagctggtttctaagcaaataagtactaagtggttttatggttattctggtataaaacctgagtattcaaactttcagacacctttttacattcttcatttctgggattttagaatcccttttgggttgaattttatgataaaaaaaaagtaattatacattcaagggcattttggaacagacccaaacattttttaaagtatttgctgtcaatccttttttatttgaagtgagggatataaataagtaagttaaaaataaaattctgctgagcaaaatggcaagctgtttctggtaccataaaaatcttacctaagatttcttgtccctggctaagcatccagaagtgacccagagtgacctatggaagacttatggaagtcatttttggacttctgttaaatcacaaccttggtatatcagttgggcaggtagtattaggcagaaatatgtggtgaaaagaacaggaggtaagaatgcctatatatctactctttgtcatttactaggcacagatcttgggctcttccattaacctccaccagcctcattttcctcaccattaaatgggaataggatactttctttactgcagagggtcatatggaaatgtaaataaagtgatgaatgtgaagtgctttggaggccttataagctgggcaggcatatgatgttatcatttttattgtcctcattatctccccgttaggtgatacatgatcaatatcaaggtgggatttatcccacgtcaccttttgtagatttttttgtaaattttttcttactcatttactcatcagatccccgcatccacagtgccaacatgccacagggcaaaggccctgtgtgataagtgagggattttttccaacttggttagaggtgaacctaagtggggttaagtttgttattgtatgtttcaggacctgtttgctatgaagcaatgttttgtgcattatgaagaaaaaatgttggtaaatgacaagaggacacccacaaaataattttgactgtctgtgaatgatgctttattttgaatttctctcatatttctcttcccttactttggctgtcaccatgtggcttacttgtagaggacttggtttttgctgattcccagtcacttctgagtagacatatttcttaaaagtgtggagacgatcatctgtcactgcccatattgggtaaggaaaagtcagagaaatgtgaagatgcactaactctttctagttattgtgcttgatgggtttgctccaaagattctgaaaatcagtagaaatggagagagaaaaaaagtttaaaatagaaagattgaatgactcatattaagcacttgaagtgcacctttcctgctcagtgaagaagcttctcaggtttctatgctatattctcatttgcctccaaataaactgaacaatgaactgtgttttgcaatagtgcgaaagagtatattctgtactaccaataatatattacctttgttttaaaggtgaattctagacctaacctttttatgaactaagttaaacatttctcagttttatgtatgttgagtttgatgaaatgtgtgttatagcctttgcttctttccttttccattaggttcttgttcattctcttaggtcctaaggggaaagccaagtcctaccacgagattggcagagccattgccaccctgatgtctgatgaggtaggaaatcaggaagatggagttctgtgaatgtcctacttgtttgttgtcatactgtgaattggctgtcacaatttattcaattagaattatgtggttactagacttccttatagcatgaggtacggtcatttgagacaaatgagctgaatcctatatggtttgcaaaaagtaaggcatgcattttggttttctatgggattctaaactctgttggaataaaacatattttcctttcttttaccaaacattttcatttcttaaaactgatatatgtcaaatattctttaaaaagttcaaagtcagctgggcatggtggctcacgcctgtaatcccagcactttgagaggtcgaggtgggcagatcacctgaggtcaggagttcgagaccagcctgaccaacatggtgaaaacccgtttctactaaaaataaaaaaattagccaggcatggtggtgcatgcctgtaatcccagctactcagaaggctgaggcaggagaatcactagaacctgagatgcagaggttgcagtgagctgagatcacgccactgcactccagcctgggcaacagagcgagattccatctcaaaaaaaaaaaaaaaaaaaggttcaaggtcattgtattaacttaaactttatctcttgaagttttaatacactaattctgggaattcaaatgtctatattctatattatttcagaaatgatgggttctataaaataatgtctaataaaatggataatgcattttttcttaggtatcagaaagtacatgttttatggttttcttatttcgtgggaaggaatgatacacatctaaaaatgcattagcaaccattatggcaaagtatctgtacaggttggaattatgaccccatttattttcataacagcctggatgttacatgcattttagatatgagaaaattctgaactattcccataggaggagaaatactgttagaatacaggatcattagtttctgctcctgggtctttctgggcttactatttccccaaatgtattgcttttgcttcattgcttgatttgtcggtttttctgtgtgttaagtggagaaaggggtacctttctccttagttatagatgttccatgtggtgattactcaggtagctattttattctgtgactgaaagctttatggctatgctgctttttcccttcaagggaacatttattttattcatctcagtgcattcattttattttttgcatttttgtaatttagatctgttttaaaaaatactttctcctaagatgtatcaattaagaatactttaacaagtgagatttagagtggcttaaacaatttgggatttatttggaagtttggaggtaggtagttgctggggttattttaacataacggcttaatgataaatcaagagctaaggctcttgctaaatttatgatcttaaaatagcatgttttcttttcctgtcagtatggtaaaacgacattgcctaccatcagctccagtcatcttatctgtatttattcaaagtaggaagaacagtgtggtaatgctagctgtatctccctttttaaacaggtattctagagctttcccagacagcctttttcttatatcttattagttggaattgttcatctttatctgcacagttggctgggaaagtgaatctgtgactttccagcctctatcatgagaaacagcaagagaaagaaaataaggttgaggatggctatatcagccacagattatgtgctggcattttgtgtcaccctcccctcaaccccacaacccccagactgttaaatgttacttaattgatagcttttaaaaattcttttcctagagaagtggtttagtcacaatctttaagaataggtaagggtattgaacagggaccatcttctcttctgaagactaaagaatttgacttatgaagtatgaaagacttaggttatatgtaaagaaatttcagatcatcagctctgttagaaaaatggaatgattgacagaaagattgtgtacattttggaacctctttctttggagatctgcataaaagatatgaagcacttgctgcattagatggtttagttgttgtcttgctaaaagatagacagatgattgactatttaaggccttttggttaatgtgctgccgatataacccagatttttcttttttaaatatctcacattgtgtgtttgagagctcagtgtttgggtcttaacccgatcttaacactcagcttgaacttttccttcttgagttatcagcaatttttatcccagtagtttttatttcagggaatgactcttcagtatatttctccaaaccattttaatctggctcccatagcaactgtatcagtagtggtacataccagtgggagctgaaaggcaatgttgttttatattattggtaggaaaaaaaaccacataaaaacatagctgtttcttcaggcctctgcctctattctttgaaatcataatctgaatgcctatattttcggggggcaggctgaataatagggactatcagagcatggctggattaatattaatagcacagttgttatgggctgcattcttcaggcttgatatggtgtgaagcatgtacagagttatctttttggatgagcacatcttttattattctttaggtgttccatgacattgcttataaagcaaaagacaggcacgacctgattgctggtattgatgagttcctagatgaagtcatcgtccttccacctggggaatgggatccagcaattaggatagagcctcctaagagtcttccatcctctgacaaaaggtaaattataggcagttgataattttcagtagctgagatgactctgagaaggaggttgtgttaaaaaaaaaaagtgaagtcaacctgttgttctaatattttcaggttcctgtttaacttgatgtattttctcaaatggatcacttatgtgccttggtttcacgtttccttggcattgtaaaataaatgttatgtggtatgatgttcttcagttattataaattggagatctcagattactacatgggaatgtatcacagacatgctttggcgatgttttggggaccccctgtatatctggaaacataaatttactgaagatgagtccttgtagatgtacatggttaagacattgggtaaaatagttgaagagaaacaattttctagaaatctattttttcccagttgaagcagtttccctcttttaagacatacagttcattcaactttcctattcatccagtcatttgtattggttctaaatgtaacacttaaagaactgtctgttagatagcagaaagaaataacaatctttcaccttaagggttttcactccatctccccattagccagagcatgatacagctaagaagcgaatgaataaaataaactaatatactcttgggctctgttgtcttgcttagaaagaatatgtactcaggtggagagaatgttcagatgaatggggatacgccccatgatggaggtcacggaggaggaggacatggggattgtgaagaattgcagcgaactggacggtaactgacagtttcctttgccattcatgatgaggttctccttaaatgtaaatttcccttcatctatcaacatattattcactagtttgttcatctgttcagccaacaaatatttatggtatacctatttgtcacaggcactgggaatatagcagtgaattaaatgatactgtattcccataaggatcttatattgtagtgacaagacataaacagtaagtgaataagtaaatgtggtgatggttttatggggaaaattaaggcagaagtagggactttgaggatgggagtattgtattccaattttagataagagtggtcagagaaggccttacaaagaatggcaacatttgaagaaagtgctacaggaggtgggagacagaccaggtgggtgtggtgggtgtgtgggggtgggctgcaacagagtgcctggtgtgtgacagggctggcatcaaagccagcaagactagaggggaatgactgagggtgtgttagggtcagagagatggcagaggactgacagatgtaccagccttcacctcttggctttcataattccatttctcacctgtatgtgtattcaacagtgagtagcatgatataggaatgagttctcactgttctgcctccttagcctgcaattgggaattcaggtttcctaaattgcttcagctaatttctttccatgataactcttccttccctaccattagattgttccttttattgggtgttaagtaaaattttaagtgggatacttattttatgaagatatggctttttaaaaacactgcagggtttttttttaacatgaaaaggtatgtcattataatatgcaattgaatgtgaatgaaatgaagttatttcattctcctgatgacccacttggatttctctctcaaattaacaggatattattcctctgtcctttattctgaaaggatagagaacataaaatcttctctcctctcctcccctaacctttttttgaatagttttttgtaaattatttccattaggaatatccttttctttttttacagacatgagttctgggctttaatttttaatttaatcagaatatatttcattcttttatatttcacctttgctaaactaattgaatgtctgtagtatgcctggtaccatgcatagccctgtgaatactaagaaaactgaagcagggcactgagtgcggctaaggtccagtggttgtgcagacagatagatggacgatcctaataaaatgtaatagccaagagtggaaatatgaactgtaagtgcaaggtcaagacttcggagagctgttgagcttcagaatagggcattctaggcagaagccctggggaagactgaggtttgaggcttggttgggagggtgagtagactgacgtgcaagtcactcaactgacctgctgacatttgtcatgggactcagctgcatttcctcccatcacacacctccatggcttcctcccttagttccttcaggtccttaccctaaagtcaccttcttggagaccttttctggccactctatctaaaatttcaaccaccttttttccagtactacataatgctctttcccatttaatttttcttttgatttttatcactatgtgttgcatttattcatttattgtctgcctccttttcatccccagagtaaactccatgaaagcagaggttttttgatgcatgttgttcactgttatgtcctcagcactcagaagagtgccagagtgtgggcatatcgcaggtgctcagtagcatttattgaagatgaaagaatgaatgatgaataaatgagtgagtgaatggatgaatgaatgagggtggaaagggtactatggcgagatgatgaagggcctttatatgatctgcttgcatattaggacgtttttctctaggcaatgaaacattttaatgtatttacacagttcactcttttctaaagaccaactggctgatcttcaggaaatgtgacacctaatttggtgacccaaaaagaaagagatagaagaaaatttattcctttatagttttctggtttcatcgtaagtggttaagtagtatcttgtcactgattcaagcattttaaatatgttgtgtttgatttaatgagttacctcttgattaatttgatggtaatttactttacatttagtggatgtttgcattctctctgcccaggttctgtggtggactaattaaagacataaagaggaaagcgccattttttgccagtgatttttatgatgctttaaatattcaagctctttcggcaattctcttcatttatctggcaactgtaactaatgctatcacttttggaggactgcttggggatgccactgacaacatgcaggtgggtatggttttgaggaggacacaaatagtacagcccagattgccttcctcacccctacagctcagttagaagcagatggcctttcagttactcagcgtgattttctttcttttgctggatgctgcattttactttgcttctggcctgctgctgtatttccagcattttagtaattataaaaatagctcgatgaaatctggcttgagtcacaagtagggaaaggaagggaaggaaatgaggatatacaattctatttgggcaaaagcatatcagctgctttaattttgtacagtgcacaaggtttagatcttctactagtttgactatgtggaacatattctgttaaacttgatgattacactttctttgggaatgtatgattagcttaattttacacatgagcaaatagcttccaaccattgagcgatttgctcaaagttgggtttgcatgtttaccagtataatttggttttaatgaatataagctaacagttatatctcctgcaggtggacctgattctcattaagctgtaacgactctggcttgacttattttgtatgattaattgtaaccacaattagttggttacttctcagatagcattatcttccttttgcaacaataataaagttttggtgatagaaaagatgtgtctgattccctccaccaaccagaaaaatatgtcccaaattacttttagttggtccaatccttttcagaaaagctattgtgctaggtgatgaatacgagtagtgaatgaagttatattcctatgaaaaggaccagattgaagcccttttcacacttttccttccactttactatatattattgtataacctatgtggtattcataagtgatgccagccagcttattttttttttaaatgcagctgattccataggattgctgtttttctactttggttttctttcctgggcacatgcatattttagatttttgtctaaatacaaaaatactatggagattataacatctatgttgacctaagtaaaaagggagaaattatacaattgtattttagtttgtcaagtgcagttttatcttttagttcttatctagtactgcatagcatgttaccccaaaacttagaggcttgaaacaaccattttattactctctttcatggctggatggtgggttggctcagctgagtggttctctctttggtccctcattcacttgcagtcagatggcagcagaggttgaggtcacgcagcagcttctttactcatgtgttggtgcctaagctaggatgtccagaatatttggggtctggatactctccacacgacttctccacatagctaacttgggctttctcacagtggggggactgtgatgacgtctaagagctcatgctccatcagaaagaggcagttgccactcagctttgctttttcccacataaatgtgtacgcagtattgcttcattttctgatcttcaaagagaggctgaaaattctgattcttagtgaaaccagtgatttttaaatattggcaactgattaacattttaggaaataatatcgtgctggtcaaagaacacatacctctgtgttaccagtgagagatctgcagcatgggttatgagaaccaactctaataggacatagagatgaaatagacagagcatgtttttctccttttccctcatttgtaagacaaaactgaatacattaaattgtagtagtgatgtcagtaatagaatttttataaaatttgatctatatccaagttgggcagctattcttcatctaaatgacagcgtaaggataactaaaacagatcgttcaagaaaaaaaatggagaagatggcactggggaaacaccctacggccagcttgaagaagttaatacaggcaaccacatgttaagaaaatagaagaaagctgtgattttgagagggcggtaagaacaaaactgtcttccgtctgtcagaatgtatagagactttcttgtgttgtgcagataatttttaaactttttttgatggacattctcattgagatggggacattgcaatattgcctatgtgtattagtttattgccttttttgaattgaattgtaattctttgcaacctcataagacttggctttacaatgctgcatctgactgtagagaagaagtctgttcagatctgttttgatccctcctagatggatgaacttctttatgagtaggttttgggaaagtagagcactctattatgtaacatacatagttaattggtatttttctcctatgtgatatatgacctgggaaaggccttgctggtggaattagctattttctgtgttctaaagatttcaagaggaacgtaaatactttcagtgcttcaggatgttaagtagtccactaaaataaccatttgctggatgtgactcctaagagctgactttcaaatttatggggaaattttccagatgtaatttgattattttattaatagattttttaacctccattgataatttcactgaaactgtggatggattgtttgaaaatactgaagaacatgtttttcactctcttccaaagcttttttcctttaagaaacatattggcaatatctttctcctagaatacaattttgatacatctagaaattacagtaagtggcaaaaacactgaaaaagaggcatagaaaattaatgactatgaatttaaatttgttgaaccaaaacttaacaaatattaatagttttatatattttaaggactagggagtaaggtgatttaatgtggaatttaaggtggaagataatctcttgattgaaagggtatgtactttaccgcacaaaatttttgattttctggcaggagaagtcttcttgacctgggaccaggataaggaaatattttgtaaatttggtgctaaggcccaggtcattttacaggtctatggcagaagttgattcattccttgcaaatatttatggagtgtctactatgtgtttgacactgttttaagtgctggagataaagatagatgagcaaaatagacaggaattccaattttgaatcccagttatagtgtagggtattgatgaaaacagtctttttcagtcacccccaagagataccagtagtggggtgtagtgggcttatttaggggatgaagtcctctggcttcacttgcttttctaaacagtagaccaagactaagcagaaaagcattggcagagcctgaaataatctgcagttatgtcacatgccttcataaatgtggcagtgggttattcacaaaagcacaggcagctcaaatgagtcaactgagaacagtgtccttgcttttaaaggcagacagctcagagatggttcacatagggcctttattgtcaggctacaaatagacatgggtgctgggtagaaacgtgttgtgaaaacacagatgagtcactgcatggctgttgtctaagcaaactcttctgccagcttctgttcagaaggtcttgcctgtttgaagcatttatgttagagcatatatatacacatatataattagaagcagattattttgggagctatgtagattatttcccatgaaattatgttcaaaatagaacagttgaggctacagtgactctaagtacaatcatacagttataatgctgacatagatgattgcatgaattcactagcttggcgtacacattttgcccattaggctgctctgagagaactctgggacttacagaatgggtattcacaaatttcttgttaaatgtcagcagtaaactttagctacggcttctttgagtaactgaaccactcagccaagagttgacattacattcatctgagatgcaaccctggcttgtgactgtttcctttttttatggtacagcaatggaggactagaacataagctttccgaagtctgagaattatgtgacattcttattttccttttcttatagtaagttccacattaatactctggtctccttgccatattgtcaggtaaacaaaggcttttcatccttaccatcctaaataacgtgtccccttcataactaaactctctgtaaccatgcatgccaactcactacattattgcagtcattcctcgatatcagcagaggattggttccaggaccccctttcctcccatggataccaaaattcatcgatgtgcaaatctcttttacaaaatggagtactatttatgtagtacctttgcacatccatatactttaaattatctctaggttacttataatgcctaatacaatgcaaatactatgaaatacgttatactatattttaaattttgtattagcatttattgttatattgttatgttttatttttattttttcctatttttgatctgcagttggttgaatccactgatgtggaacccattcatatggatgggccaattcatttatattcttggttgccaaacaagtatactgcttaattcatgtagctacttctaattaaattgttaaatgtcagcatataaatatatttcagtagaatttattactactattggttgttcattcaaagtactgtctgaatggaacctatgcaaattaaatcaacacatatttatggattacttagtctatgggcaagatacttatataaggaataatttttgataccttgtgaaaagtcttatattatttaaaaaattgttccttttagtgttatgagatacagaaaagtattttaatttaaatctacattgttgattgtgaatgaataagcacagtctagagtgaagactgagtgaagaaagtaattttaatttttttccaggagtaaatataatcctattttcacaaaccttttagcaaaagaatacagtaagatttttagattctgtgaattttgtgatatttatggagcttaacagagcacattttaagggaacttgtctcataataaggaacatttatagttgccatctccaaatttgagactttattttaacataaagctgtgctgagaatatttaatcaatctgcttaagttggaactatatcatttcttatttacatgtgatgttccttgataagatagacaaatctttacaaagcctattatgtgtaatttataacagcaagattaaagcaaattggtaattgctttactatattgagaattgtacaagaatttcaatttagctgagtgttgtactttggcaccaaaatgcatttcctccttgaagtgaaaatataaggtgacgttaatctacactatcaacatattccagtttcaaagttaggtagagattgtctgttggaatgacacaattttggtaggtaaaaataaatagacatatttagtgacaaaataaggattctgcattacctggttgcctttaaaacttattagctatttcttctttaaagaagctttaaataatgtgctttgcttcatgggcaagttgtgaattaaatcctgtttgattgaggttaagtaatgtgtatttggtgggtttttttatttgaaagacctttgtcaccctatttccttgatgatcagaaaatgatagtgatttaggcagggatgtggggagtctcaactgatgctaaattctaattcttattttgtgtttgacttgcaactgttttgagaataagatataattatgtattgtagaaaattccaaaaatccaaaaaaattacgtagaaggtaattttgcccttaaacccatcaaccagaattgatcattattaacattgtcatgaacactttcccatacatcttaaaattcatgtgtatacagatagattgacataaaggatgctgttacataactttagtatttcatggatgtctttccacttcagtatgaatatttaacatcatttttaatgaccacatatatttatgcacatgatgcatgtgctattactataacagagcccctcttagtggacttttagtttttcccagttttttataaacaaaaaaatgtaggtgattaactacatgtttattatctgtgattaccttcctagggcaaatttctagcagaatgatagcaggatgtgctcattttattttttgatatttgtttcaaatacactacacaaggctataccagttcatatgtctaccaataacggacaaggatgtccacttgcttatacccttgtaaaaacagaattttgtcccatattctcattttttgtcgttctgtgggttgaaaaataatggttcatttttgtttaattctaatttctttgattacttagtgagggtgaatctccttttacatttttattgattgtctatacttctttatacttgtatcattggtatattttccttttggggcattagggtttttttcattgccttatgagaactctttgtataataaggatattttctctttgcttgtgagaaatattacaaaacatatttttcttagggttaccatatgtcttttaaccttatttatgatttcttttgctgtatagatcttaatttttgtgtagccaaaatcgtcaattttttaatagtttcttcttttcatgatatatttagagaggttttccctaccccaagataaaggaaatatttacccacatattttagttcttttctgttttcgtttaaattttttatccatctggaattggtttttgtgtaaggttatactggcctaatgtttccgatgatccagatacgtattcacagctcttcaaacaaaaaaaatattagaaagccctccatgtcttgctcatccagcctattagacttggaactcttggtaagatttttggctcaaacttttcttcaagcagggagataattcgtctttcaagtcttgcctctttttcatttcctgctgggcattgtaaacagaaatccttgcttatgacgacaaagtactttaggcagagcgggtggcaataaggatttggcagctgtgatctgtcaggacagaaatcactgatttattggctgtagctacacaggggaaataaaaaaatgagggttgtatatccagtctccttccccaatgtagatgaatggtctgtgtgaccaatcgttactgatattctgaaggagaaggggaggtacatctcacatttggggcacatgggaatcacttgggggacttaaaaacatactgaatccctaggcattgtcttcattggttctgatttaattgtttagggtggaaataaagaatcagtattttttttattaaaaaatcttctgagatgactctcatgtgacccaaatttgctttagatacttgaatcatttctccacttatttttgatcgtgtggtttgtcttatgctggtgacctgacatcaaaattcatataggttaattctgctctgactgcttatttccagtgacattgggctacctcataattcttgactaaactttagtttcaaaggcttatctagcaaaatttaattttattatttattattcaatatgctgcagagttccttatgaacaccaccaaaaagactggtgtttctttttgctgttataaacaaacaaaattctaaagcctgaaacacgacagtaatgttggtaaatgctttatcatttgatgccacctttatcttccatactttagtgggtggaaaattgtcaaaaaaaatagaaaattttttgttttcctaggctgttctgtcacttttctccttagccttttttccccttctgttattgtcactcagcctccctaaacaggtttataattattaatccaaataataaagtccttaataaaaaggacataaaacaacaaaagtcactttttagtgttatacgaagaaaccaaattgcgataaatccaagttgacagcatagatttttaatatttgatgtttcatcatcttgaatgtgcttgcgttgccttagccatgacaggtattggtggccttggcagcccttgccccaagttgctgaaagacataaaatgctgatattacaaattgtggttggcttttaattttttttagaatcttgctcctatggtctgatttcttttagtaaaaaatatgttttactattctgggacttgtcctaatttcttgactttaaaaaaacatgggccaaacacgggccatccttggtttaattgtataccctaatacaagctgaaaaatattcacaaatgtttttggatatcgattttgacttcactgctgtaaagtaaagcaagctattttgtttattatcattgacttgcacgtgatgcaaaggaatggaaagaagcgtctcttaatggccgtagtgttgccgcctaagacttttctgttgatttaaaatttactctgggaaatactgtagacctaaagaggcttttttttacctgtttcttctgaagactaatttttatcttttcacatcatttcttttgaatttctttttctctccttcgtctcttaaaggaaagagaaataatagagagaggctgaaaagaaggtggtgaaaagcagccaaggaaaagaaatcaacattagattgtatctctgctttatatgagactctgttcttagctctttacatattattctttcattttatccaaataattatcccgtgaagtagctattgattttacagaagagaagtaggatttagaaaggttacccagttggtcactggtagaactgagatttaaattcagatgtccctgactccaagacatgctctttgtgctgagccacctggaagagaccttagagattatccagtccaacctcctcatctttttttttttttttttttttttgaaactgtcgcctaggctggagtggagtggcgtgatctcagctcactgaaacctctgcctcctgggttcaagcaattctcctgcctcagcctcctgagtagctgggactacaggtgtgcaccaccatgcctggctaatttttgtgtttttagtagagacagagtttctccatgttggccaggctggtctcgaactcctcacctcaggtgatctgtccacctgagcctcccaaagtgctgggattacaggcgtgagccgctatgcccggctgtcatctaatatttaaataagtacagtacacatatggttgccatgtattgaaaaggtttttatcagtcagagactatgctaagcaccttacatacattatctatctaatgtgcatactaactccaggaagcataggtaggttaaataacttgcttaaagtcattgatccaggaaataatatggtatagatgtctatctgggattgtctaactccagagtccggtgctccactacagtgtctcaatttttcctctccataaaaatactgaaatttactgaggtgaagtgacatttctaagaccatcagctctctttggcagaacggagcccagactccagatttctgactgccagttgtttgctctttctactgttccacagtggtgtcacatcagaagtggaataaaatgaaagcccaaccaaaatggactagagcactttgtggcatcctattgctccacacctcagagcttagctgtctgcagcctcataaattgctagggaatatgttcctctgagaaatcaggtgtagaaatgcctttatgagttatggcttttaaaaatacacatatccacacattgttttcctttttgtatgagtgaacactgaatataataaatcagaaaagaggtttctgatagttcaccttataaattgctttaaactttacagttaaactacagttattcattacatgttattttttaaatttctgtattgtgaagaggaagatgtcaaatagttcttttctcagaaatactggaaacatctctaagtttaagcaagtttccagtgcagtgtgtataataaatcacctgtctgtgtttcaagattgtcagcaacagaatgaaaactgtagcacttaccaaaggatcaagtactgaaataaaaatatgccttttaacagtcatatggcttccataaatcaaagtggttttctggaagaaattggttgttatctttaccgaatgagcaacaatgcctgttgacctttgataagtggaacctagagtgtcatttgggtcttgcttcttggttcctttaacatttgctgagtgtctacagaccacatgtagagatggtggatagcatgatgagagaaagagaaacatggatgatgccagaagaccctgttcttatcctccccaagattaatagctatgtcaaatcaagtagagaatgcaaaaatctcttcttttgtattgctcttttcccctttatattctcccttacactcagtcagtgctgttttgatccatagtagtgataagaaatatcactctttgcttaataaagaatgttgtagtatatctgcctatcacatgcacccagagtgtagcttgtcctgccacaggaagcattcaagcttctacctttcatcttatgcatacactggtgtaagttgtaaaaaagaaagataaattataaagacatagaaagcccactgtctatgcacaagggttgaaatcctagtctgtggtacaccttttatccttaccaggggtgaagtctggttgggcaagtacatacactaaagacccaaagacttgttgtgtcacattgaatgtgaatttgttcatatcacttaactcccttgaatctcaatgtctaaatgtttcagaaatcaaggcaaatgctatttgttggcctaggataacctttttctgtcttctctgcataaatacatcttggttctgctgcccttccttgttattctggtttctgtccctgtgaggaagaatgagcaagatagtctctctacggaatggctataaataatgagatggtacccttcagccatgtgctggacctacatccatgtaaatggaagtccttatgagaccttcctgccaggcttcaaacctagatttgtgtatgaactggagttgttctggattgtttcagagtgtgtgtatttgccatgagagaagccaatcttactatttaattgtcaagtcttgttttttatccaccgtcatcccaactacattattatctagtgctgctctaaaggatttttgtttgttttctgaattgaattccacccttaaaataggaggatgtgctattgctaatgtcaatctatggagaatgttgctgtctctgaagtagtgttgtaagaaatattttgagtaattattgtaataatggtctcctaagcttttgagtggcacttactgtgtaagttttgtaagttgatttaaaaaacaatttcttcataatcattttatgtatattgtattttctttaaaaatgataagtgaatgagaagttgctggagaacttttgggacagtggtaagaggtggcctagtgaggctgacagatggataggttaactcggaggttgagggtcacaggaaatgactgagggacactgcagattccccagaaatccactctgctccagtcaaggggtcatttcaattaaaaggcttattttatgtggcataaatcatacttctaacaacatgtaatttattgtttaattgaagagagaactcttcctataccaagagatcacatgattttgctccactgttttatctaccactgcatatattattgtgtcctttaaagctatagaatttctttactcatttgaaaatgttttattttaaaagttttaatgttcagatttatagcttcatgtatgaataaagggtttctgtcatctttttatgtttaaaaatcatgtcttcataaaatattattttatgtctacaaaagaaccttcctacaaatacacatgtgcttgtctataggttggtgcaaaagtaatcgcggtttttgccattaccctaattattttaatggcaaaaaccacgataacttttgcaccaacctaactactaactaaactaataactaaagtttgaaataatgaaaaaataggaaacagcctagtttgtcatccttgaaagcattggtcctgagtgacgtgattaggaaagttaggatcgttttgtaagtcagtgatcctcgttgacacgtcacctttgtttttattattctaaaggaaaatgatgggttgatttccagagatgtaactaaaaggaaatgtggccataaaagactacttatttatgttccagcacatatattttctctagaaatagttaattgaagctcttctataagtttacattggacaatgaaaatgtaatgagaatgtcttttgaaattggtgtcttagaaattgcagaatggaggacaaatcacttttttggtcccctttgtgcccctctctatttcaaaggtgtttctctaggaaaaaaatagcttttgtacataaaagagagctactgataagtgcctactatgtgcaaggcgaaatcaggctaaacactgaaaggaaccacaaagaggaaattgccaccaaaagtaccaagtcacttctaaccatttgattctgacgtgtagaagcttcagttagtattttagtaaggatcggagccaccttttgccttctacacaccagccatcatagtaattatagtgctttagagcaggtcgacccttggagtagggaaccatgactaaattgtaggtgaaataaatgtgaaataagtggtggcaatatgcatatgggtaaaagactttgttcttcattcttgatatgtttgctaagaccctcctaatagtatattcacgtggctttatttgcctagtgacatcacaaatgagaagaaaaaagatgtgtttcatttaacatctatattttctttattttagggcgtgttggagagtttcctgggcactgctgtctctggagccatcttttgcctttttgctggtcaaccactcactattctgagcagcaccggacctgtcctagtttttgagaggcttctatttaatttcagcaagtatgtacatacatatttaattgcaaattagaattgcttaattgtagaacctttataggctagatagagcatagaatagtgattaggcagatccaagaatcactcagaatactggaatgttcagatgtgagaggtgaaagggccttagcaattaggtagtcaccacttgtttcagatgtgattcgactgaggctcttatgttgtgtgtatccttgctcccttcccacttactctctttcccattgtcctgccctgtgctctaggggctgatgcctgtggacagcaacacccatgcccctttgccttctggcttcctcttgggtttggctaatggggagtaccaacaagacgggaagagagagagagagagagagagagagagagagagggagagagagagaggtctgagtatgtctgcctttccccagctcaccgtctttgttttagcacagcattctggcagtgcttatccccgaggactttagcccctgtcaagtggctcatccaccttgactctagccctcaccaggctctggtagctctattccttccttggccttttcaagcctgaagttagtagtggcttcctgctgttgatggtccctgagtgccttgccatttgttattacttcagaatgccttctatttcctgccataatcctgactgacatgctagagaaattaaattgattaagttcacatcattcaataatgaaagagactggatgctctttacttagtccactgctcctcaccccagtttcatgttcttaactaaagatagcttccaaaactcagctgaataaatacctaacatttattgagagttgatcatgtaccaagtattatcctaggcactttacatgtactaactcatttaattcttacagcaatcctgtgaggtagggaccacatcctgatttatagatgaaataacaagcacaggaacaataagtaaattgcctaatattatatcacaagtcatcggtggggctgggatatgaattcctgctttctgactccagagtccaagtctcttcaggaatcactagaagtttctaatggacattgcaattatgatatcagcattttcttttagaaatttatggatcattttaagaaggggaaacgtgagtttccccaagtggccacattaatacacaaatagattcaaaatcaaattgggtattccagcctctttctaatgtagttgatacctctaagagagaattgcctttactggcagatctcaatccttaggtagattgaagaatgtctcatggcctgctggcactccttgttggcattcccatagtcatattgttatacatttttaggattttaattttagaactgtcattaccttcatagtacatcatggacttatggactcatatatagcctttgaaagtatgtgtgttatcaaaaatagtcataagatggaggagggaatgaggatttaaaaccagctttttgaaaacagggttgaggatatcagcaggagtcttttgagaatgtaaaaagttccaaattttaagtagtgttgtgaattttctgtaggtaattattattataaatcccttctctatcataattctcagaagaacattggaaagaattttattcatgttagtttatagaaagagtcaaacagtttttatatgtttaaggaaacattgtgtgagacaagaaagcctttgtggaaagattaaacaaggatgtactataaacaggaacaaacatgcacaaactttgcagaaagatttattggatgaaatgtgatcagagccttaatctacagaaaatgtttgcatcccagtttgttttaagtaattgtgagatacagattatttcctttcactaagcaagttcctttctcgttctcccttttttttctatcataattggtaacataacatagttccaagtgatttatttgaaaacagttgtacatcaacaagaaacatttgagaagccatgctttaaatccatcacttagtaatatgtggcaagcgttattttaatctcaatgctatatcatttgtttatgttatagcagcagcagtgataatcttctgtctagatacaaaatatttgggtagatcactatttccaaaagtgtgtttcatcaattactagactcattccatgctccatgaaaaaaaaaaacctctgtggtcccagtaagtctgggaagtgctgtatactatatacccccctcttggtagttcactttagactttagcatgcaagtgatctgaaaaagtccttcagttaagaactattttactttgtcttgcccagattttccccaacatattttaccactgttgaagaataggtagatccttgctttgtaggttcactggactcaaactctgcataatcatggatttatttctgaggttttgatatttgccctgtaaactggagaattataaaggaatatgaatgatatgctgccatctcttaaaatcagtaatagaaggaagaaaatagctcacaacttttcaaagatacttgtagttttatttcccaaattctgcaatctgttttgcattatttttacacattttatcacaataataattagattccttctttttacttgggtgaggaatctgaaagatgtttcagcaatgtgttctaaggtatataaaaacttcacaattaaggttggattttaacttgtattattatcatttggtcattcagtatttttccctatattctttaaacagtttacttttaagccttcaaatttttaattcgtccatgatattaccggatgtatttttttagggagtttatatttatttgtcagtggctgcacattaatttctgtagcatatttcagatgtgacttcttcagtttgtcttgtatccttggttttatgctactgagaaactatgactcaaaaaatctaggaacactgagtggtaccataatgatatgaatctattttttccttttaattcaccataatttcttctttgatctctaatatcatttcctgttgctttttaaaacttaattgctgtttaaatttggcaccaagggaatttattggatgtaataataccattttactgtaatcattactgatgatcaacttatttacatttttctcatcccttattcctctttcttcttgatgctctacacatatcactttcataatgaagtgccattggttttattgactttatttgggtcattcttgttgaactactgtagtattgcttaagtcttttaaagcagctagtttagcatattgtttagattctaaggtttaagtttatacatgtatcttttcctttgtacccaaactaatgttgttcctaaccattagctagttaatggatttgtttctcatcctatcctgtaaacattaaatctataaacaactactagcattcttagaacaaatcaagattgctctttcatcttcttgctagggtagcaaaactaggtaattgtttaaaatttttattttaatttaaggaaaaagtatgttgtctcagaagtaacagaactgtatttcttagttgttattctgacactgactcattgtatgataatgtaaattatatcaaatttctagaactcagttttttctatagtttacttatctcacataggcatgcataggatgaaaacagtggtgttccggacacaaagcaaactgcaaaggaaagtaaaagttatcttcagaaggatcccataaagtctattgaagataactttaccccagtattaataatctccttcttcggtaatgtatttcaatttgcatgattagataagaagagaaaaacaaaagacattgactttaatattcaccctctctagagctaaatacaaatcagatggggaatcatgctacaatttttaaaaggaaaatctaagaatcaagagatttggtttctggtcaagctctgtcaggaaaggccttaaaactctgatgttggataaatgatttaacttccattggtcttggtgtctttatctataaaatgagttgtaatttgacagattggtgtctgtattagccagtgttctccagagaaacagaacccataaaatgtgagtgtgtgtgcagatttattataaagagttggctcatgcaattatagaggctgacaaggctgacaggctggagacccaggggagccaatgctcctatttgagtctgaaggctgtctgctgtagaaccaggaagagctgatgttgtggaagttcaaaggcagtctgctggagaattctctgctgccctggggaaggtcaatcttttttgttttattcaggcttgcaactgattggatgagttcctcccacatactatggagggtgatctgctttactcaaagcccaccaatttgaatgtttatttctcaaaagacaccctaacagaaacacccagaataatgtttgaccaaatgtctgggtgcttcgtagcctggtcaggacataaaattaatcatcacagtacctaaagaactttaaattctaatattctataattttgagctatcataggaacagtcatgtcttggttgcatgagacatagttcataggtcagtgtcagtaactgtctcagccaagtcttaagttacagacatgcatttattcatcctgcaagtctttattgggcactttctatgtgccaggcactgtgctaggtaaagaatttgaattttattctaagggcaatgggaagctattgaaagatttaagctagggtgtctgactttcattaaaagggataattttggctgtggtgtggaaaatggctttgagtgaggcgagtatagatatcagtaaggatatcaatgagggggtttgtatcaggcaaaaacttacctgtgggttgggtaagattgggttggtgctggtagaggtggagagttgactgcctatgggaaagttttaagatatatcattagcagttatcagaaactcattgtctaaaagcaaggttctagagtgtcaagcatgcacaatccttgacttatttcttattctcatgcaagtaatacctactacccgctttttcgtcacaaataaatagagtttaaaaaatcattgtaaagcactctccacataattttaaagggatcagtataaaatggtaagacattaacacttgacccatcctttcagagttgtgaatcttgaactattaatcaatcagttgtaagaaatgggaaaggcctcaaaagacagtgatctccttagatagaagtagcctattctaagtctgctgtgggacaaacacagaaagatgttggtcgcaagatgcttcacacccagcttcagcagaagaatatcagatctgtgagcaagcttcataagaagtggaagggtctggcagtagcatggcaagacagcctttcttgatctgatgacagatcatatttctaattccacctcatgttggtggcacactgtccacacacagtgagcattacaggccatcttgtgccacgttatctttttaactattttttcctcttcctggccttgctctctctggtctgtccagaaagtttctactacttatccttgaacaccttgaattttttctgcgacttcatctttccttccagccagaattagttactccttcttctgtaacattatcacttagtattttatagtgcgattacatttatcgatttgtttccctcagtagaccgtgatgacatagggacagaaaatatattgatcttcatgtctttatgaacccataaaactcatacaaacgtttattgaacacattctaggtaccagtgctatgcttgcaaattgtttactctataaactctatgaaggtagggaccatattttttgaatgagaaaaataataaggttttcacatataaatgatataactactttcaatgcattttcctcaaacttttattgctattttaaaaattgtatcattaaactaaattcttaaacttagtgctttctggctaaagtagagtttcacatttagtggctaaaggtgatcttgtatttttgtcaatctttctgtagacatttggtagttttatattattctttgtgttccaaggaggaggaatctaaacatttttctttcttttttccagggacaataattttgactatttggagtttcgcctttggattggcctgtggtccgccttcctatgtctcattttggtagccactgatgccagcttcttggttcaatacttcacacgtttcacggaggagggcttttcctctctgattagcttcatctttatctatgatgctttcaagaagatgatcaagcttgcagattactaccccatcaactccaacttcaaagtgggctacaacactctcttttcctgtacctgtgtgccacctgacccaggtgagggcattacgctttgtgtttatgctcgctttgtatttggaggaaggtgtaggctccatgcttgcaaattttcaacatgctgtcatggtcctcaggaattagtcttgtttttttctctgaaaaactctgctactgaatttgatgtctcattgcctgaggtattttagctgtatgattcaaccaggaaggagaccaggagctctggaatgtgaacataaccaactcaatattttgaaattaactcaaactgtgggatttgcaaggaattcatgtgtacattattcttgattttataagtggggaaacctggatacatgtattaacagatataaatatgtgacaaacctatcctttgctgcttctttattggtgtaggaatgtcttcctttaagtaaacctttaatacatgattttaaacttatagaagaaaaagatactaatccacttcagataatttaaagaattaaattatgaaaaaaagaaattcagattggaattgcctactggtagaattttatagtttatctctactagacaaataagaaaagaaaggaagagagaagaagaaatgaaagaaggaatgtgatgttctaggagtagatttatattgtagaatccagaaggacataacagcaaaagtaactcctggaaaggaatgtgattctctatatcttagccctttaaaatctatcataccaaacatgagttgacatcagaactttttcacaaaaaaataaaaataaaaaaatgttcagcttggtctttggaattctttcttggagtaattccattataaaattccattttataatatgaaaggcatttcaaaaaaggatttactttgagggaaattgttttagatcttctctcatagaaaaaggaatagggactgggtgtggtgtctcatgcctgtaattttgaaattaactcaaattgcagtatttgcaaggaattaaagtctgtattattctttgtacagcactttgagaggctgaggcaggtggattgcttgagcccaggagtttgagaccagtccgggcaacattatgaaaccctgtgtctacaaaaaatagaaaaaccagccgggtgtggtggcacgtacctgtagctactcaagtggctgagggagtagcaagaccctgtcaaaaaaaaaaaaaaaaagagaaagggataggcatttgtgtcagacaattacatgttagtagcactagtgattctaggttacgcaattagatacaggtctatgtcccttaaaataaaaattgatatacagtccatactttttactaaggtcttttagcaccagaagtacagcagtgttcaaagggctgggacacaaatgtggggcacattcatgcaatatccactgcgacttacagattctgaggaaaaagctcttaatgtttaccgtaaaacaaacatggttatagactagaatgcagaatgcttatgaatttaaaaaataagcaagatactactttttatgcttgtggcatgctgtttcagattgctcctagatattttggtatgcaatgcattcttctctgctacgttggtgaagaagtcttagaagactgatatgtgtcttgaattgagaaaaaagagaacactacttccctcacaataggcagtcagtaacactgatgacaagctagggcattgttgggctgtgtgctcatggattctttttgtgttaagataaattagcacacattaaaataaaacccatatttaaaagcaatgcagaaagttatataaagtagaaatttaaagattcaaactaataagaatgccatatagttatgaaagctaactagcgttcagctgtatactgatttgaaatatttgataatttaaaaagtacttggaaacaagcacaatatgtgtcattcaacccatgatatatattattattagaatcaattaaatgtgctccccagagaaacacagatgttattgtcactcaactatatggagctcttcctaggaaagaagggggataaaactcccccttcagtcagtgcttcagggaagtccagctgttcaaaatattggcttcacaaacatttaattgtgagattttcagccttcctttacatttattaatttatacataaatatatgtgtaagtttatttatttacgacttcttaggcaggtttgagtaatcatacaccaagattttctaaaggaaaaaaaacactttgagatattcatgaagccagatgtgggctttgtcaacacacctgtcacacagaaaaaaacatctaatgtcaaccccatacctacctgaggcgaatggaaacttgtgttcgttgttttataatttggatgttggcagagaaggtaacatgaaaccaaggaagacatatctaaatgtgttcaaattataaaaagtactatggttttacatgtaattttccttctaagaaggatctttgttttttttgaaaaagtgacgttaagggtggaatctattttacacttgcatagcaagtgctgacataagtggtgatagcttttcctttgtccagtttttcccaggctgtgtaaaaagtcagtgctaagtaactaggaagttgtccagaaggactctgacaattcctgctacctctagttggtaccaataaagtactgtcacaggactttgaagtcagaagatcctgtattcaagtcctggtttggctcaggccaaatgtgtgactttcagcaagttccttttcccaaggtatattagccccatcttcctaacctgtaaactaaggttaataatagtacctaccttatagatttattttgaaggaaaagaaagagctattacagataaaattcttaggacagtttctaatatgtaataagtaatcaactgttagctgccattattattgctattactgatccttaaaatttagggttagtatttagccttgaagtgtaagtaatagaataaacagacctatcttcatcatccttccttctaggcatacattgtagggcagttggcccattatgcaacaagactgttggttgtacctcttattggtactcatgaaagatatatatgtgaacatgaagaattttttaagtctatggagatgaaatctatttgtggtttggaaaaaggcagtggatagttatttgcactttcatgacaatttcatatttaacaaaaccccataagattaatgattgtgtatctcccccataaccttagtactttttgacaatgttaatacttctccataaccttactgctttttggtagcaaactgaatacattcatcatcaatttagtatttcttgatatcaaactgaaagatgatagtgagagagtaatacagttgcatatagagctcaagtaaatattctaaaaataacaaaagactggcctttcatcacaacgtgcactcttagtaaaataattcaatgagtcaataatagttaaactggcgtatgacttgtttttcaacactgggacagtatgtaacagtgaaccagcaattgcacagatggagtcgtgatcctgcaaactgagaaatgattttacaggaatggaaataggggccactaattactaaagaaacctctcttcatggccacaatatattgtggcttttttatatgtgtgtgctttgtcaaggcaacacttccttttctctttttttctttcgtcttctcacttgcttccaaaaagcctaatcatttcctaatttttcttttctaaatgcacttttttctccattcattttgctcccaactactgcttggtaacccaagtcacatacataggtttactgagcaactaaggaagcttagttgcaagtgctagtaggaaaatcagtcagaaagtttgacatatgtgagtggatacatgccatacatgggtggtttttgtgctaagatttgcttttcttagaaatgggatagctattaattagtagacgaaatggatgttaaatttcccactgtactttgatgattacatagcagagtgtgtaagaaaaacgataatttagttcaaaagccaaaagtgaaaactgaaaaatatccaattgaagaataatacacaatatctaatttcatcaccaacaccccaatttagaaatgttaatgtgataaagtgtaaatactatgtgctttagagtaaacaaaactgagtttgaatttcagtgttacccagaactaggctaattacttaatctctttgtttgataaactctgaactgggttagtgattgtgcctattcttagaggttactataaaggttaaatgagatagtatatgcaaaatagtttggcacctaatggacactgagtaaaaatttgttctttttcatatttctcactatcctacaaaagatgccccagtgagtttaatcttataatagttgtattctttaaagatttcaaacatttaattttcccataaattttcctagggaaagatactaacaaggcttctactgcaagtctgccttctcccccaaaattaacaaccagtgtgctgttatagataaatatgaaacattgaagctgtatttacaaaaaaaagttaaagcttcattgcattgtagttagagtatttaatactattgcattgaatctcgaggctacaaaagtgttgtatattatacatagtcattaagaaaaaggctttaaagtctaggggcgaggtgttcaattcttctaagaggaatctctttaatttattcaaaagcataaatactagaattttggaaatagggaaaagaacatgggcatccccccaactttcacttgttttctcttctgtcctctgtccttttttacttctcattcattcatcaacaaaaattttctgagggcctgtttcactgctttttaagaattgtgcagaaaatttttgcaatctgtccatctgacagaaggctaatatccagaatctacaaaaaatttaaacaaatttacaagaaaaaaacaaacaatcccatcaaaaagtaggcaaaggatatgaacagacacttcttgaaagaaatttatgctgccaacaaacatgaaaaaaagttcattattgctggtcattggggaaatgcaaatcaaaaccacaatgagataccatttcaggccagttagaatggagatcattaaaaagtcaggaaatagatgctggagaggatgtggagaaataggaatgttttcacactgttggtgggagtgtaaattagttcaaccattgtggaagacagtgtggtgattcctcaaggatctaaaactagaaataccatttgacccagcaatcccgtgactgggtatatacccaaaggattataaatcgttctgtaaggacacatgcataagtgtctttattgcagcaatattcacaatagcaaagacttggaaccaacccaaatgcccatcaatgatagactgggtaaataaaatgtggcacatatgtaccatggaatactatgcagccataaaaaatgatgagttcatgtcctttgcagggacatggatgaagctggaaaccatcattctcagcaaactaacataggaacagaaaaccaaataccacacgttctctctcataagtgggaatttaacaatgagaacatatgggcacagggaggggaacatcacacaccggggtctgttagggggttgggggcaaggggagggagagcattaggagaaatacctaatgatgggttgatgggtacagcaaaccaccatggcacatgtatacctgtgtaaaaaacctgcacattctgcacatgtatcccagaatttaaagtataatgataataaaaagaattgtgctacttgcagtgaagtagaatacacacatatacaaacacatattataaaatgtattgttttttaaaatagtgttaattgctttttgaatgaacaaaagtgagagtttcatttaatccaaactttggaaataaatttctaatctaatacctctgttcatttgcctaatgtgtaaatcttgcagtgactatatactcaaggcacattaatattttgaaaagggtcaaagaaaattttctgaccaggtgtcagttttacatcctgagggaaaagaaactttgctaaaaataatgaactataaaagtaagaaaaatagcctcaaagggatagacactatattgttaacaaaagggatatattttattgatttattgttgactgttccaggagaacatgcttaacaatatatgtgtaagtaaggtgagtaaattctttctcaggaaccaagtgcatccctgtctatattatcttcaagtaatagttggcttttttcctggtataaaactgtaagaccaagcctggtctggaagtaaccatggcttccagttccatacctttaagtcattcacagcataaggaggcttctagatgctctaaaatagttgtcactggagtttcaacatcatttctttctacataatttttctaatatattaataagcgctgtgcaacaatatgttatagccattcaaaagaactgctggattgcatcccctgtgttcccatattatagtcaatatgtgttttttaattagaaagcccattaaaagaaaataagaaaataaaagatcatcctaacttacctcccatgaactatatcataatatatgcaattttatttttattgtgtgccattccctctttatgaggtaggtttaaatcataaactaatggtaaaacaaggaagtataagttcttctgctgtagcatccctcaggcttgcatttgtgagactcctttaccggcacagttgacattttatcatttatggtaatagtgttttggaagagacccatcattttagtttgcttttactgtcttaacctatgttttagcagtttctgcataatgcttgccggaatcagaaaatgggattgtcatcagacctggaaaattctctagttttgggttgtgtaaaagcagatttgtaaaagtttccccatggtaatgtctataacacatctccaagatgtaatgatgggtgggtatgaaagagaagtttttgtgaaattggggacaaaatatgcccatctttttttttttttttttttgaggtggggtcttactctttcacccaaactggaatgcagtggcatgatcatagctcagtgcaacttcaaactactgggctcaagtgatcctcccacctcagcctcctgagtagctaggactacaggcacatgctaccatgcccagcttaaatatattcatctcaatatctccacagtagctcagctctttaacttccagcacaccatcgtagatgaacttgtgaagagtgcctgtagattaaagagtatacaacttgaacttgcctagttgtggtgaaaatctcaatcattaagtcttgctgaaaatacttgggaaaactaaaaggataataagaaaaaaaaaaaagaaaaacttactactgattttgtctgttttaatacttaaggctgagatagtagcaaataatttccctagaagctacttctctcagttttcctttgtcttccctcaaaagccatttttaccctttgttgcctttattgacctagaaattaaaagcatacatatttaacttaatcaaaaggtactagtgtgctcaagttatccagaacccttaaataaatctgacatgaccatgtggcagagcttatttaattttatcctttatctattttctagttacttaattgccttaagatgtttcttaaatgtaatggaataaaactttaaagtttcattatcatggaaaatagtcttaaagtttttcttgttcacatcgggttaatcagtgccacatagctgtaaccctaagaagccatgttgagggcacaggttcagattaggctaatatttattaagcaccatccaaatgccagacattttactaggggattttaatcaactatatcttgataacattgtatatttaaccatcacataaatcttgagagatagctgacattcatcccagggacaaggtctgctttctccaggtcacagagctaggagtaatcttagctgccatttatttagatctatcctgtgtttacaattttgcctacactgtgttattttatctgcacagtaaccttatgaggtagatggtttcaaatccagttttacaaatgaggaacatgtggtcaagaggtgtgaagtaactcctcaagattatgtggtgtgggagcctaagggcactatgctcagaaggtgctgggtccagaattcaagcccagtttttctagtacccccttctccacattgtattaggtgatacataaaagcagacagatatgaccttagtgaccagttgttgcttacacttgacctcacagtctcacgtgagtttgtagctgttcctgatggtacagttcctgctaatatgtaaagcagaggagccatggggtagttcctggggccaggtcactagaagataaaggggaagaacctttaacagtgcaacagatactcccctatgcaagaggtgtgccaacactgacacatggatgtcacctccttttttctctcacagctcccacaactgcagccatacttgatccacttgttctttctctaaatctctcattaaacatgaagaagtcagcttaaatgcctagtgttccattattggaatgctaagcttgtgggagttatttatatcctactgctcaaggtcatcgccaaggtctgatttttcacacacaaaaaatttttggaataaataggctaagaaggaaaagtcacagatacatttgtaaatgtcaattacttacaatattcattccctcattccagaaaatcagctaaaatctgatacatgggaaggaggaaagagatatgaaaatccaagtatggaaaacgatcaacctgtggaagctctctgaaagccagtatgaaacagagattgtcccagtggtaattggctacatctaagttagccagattcctagggcaaagggtttctttgcctcatgagccaggatgctgagtaaatgggagagacagtgtagagtgttttggcttttccatttgacttttccagaatcctaattaaggagattgcagattccatataaatggatcattctgcaattggttgccaaaatatttgcacctggatccaaatggtaaccaacggttcttgtagaccaagcttccaattgggattgatcattttcttttctgtgagcctaaagaaatttacttttaatcttgtttatggactctaacataccctgccaatatgcaattatgaaactgctttttaaatgtatttattttcaagtctttcttctgaagcagatacttattaaaataagtatggaaagtgttatatactttttactgtccttttgatgctggtcttttgggattttgagagccaatgtgctttaatagcttgtcttaggggaaaaaaattgaaattctaaaaggaatttaaatgagcagaattgatgcttatccaaaacttgagagcagctactaaaagttcagattgcaatcctattttagtacacccctggcctttattatccatcattcatttcatgaagaaagagccttgaatatctttcctcctcagtctttactccttgtttttatgcagaaaagtgtgttgcaaaaagaccttcaaactctcgtgacaggaagctgataaaattgcattaaagaatctagctcaagaagggaagcttctcaacactatccaaatagtatctgtaatttcatatatgttgcctttcctcaaaagctcagacagatcagacatttcagatcacagttgagagtcacatcatctaacattggcaagtactatctcatcttgaattctgtggccacataagtcatctgattttgatggttagaaatgctgtgtaagacaagaaagaatgctgaacaaggtcttgctaccaactctgcttctgataaactataaccctgggcaagtaactggcatagcaagcttcagagtcccatccaatatgaaatgggtataaaagtatacccattatatgctctaggatgttttaaaatgaagaaatacagtgtaagaaaatgttctttcagctttttagaacaacatagtaatataaacctagattttgttaataattatttactaacatcttcttccttttgagaatggattcattcggctttattgtttagaccaaatgtcctttagcctgtttttgtttttgtaactttcatttaagttcgggatacatgtgcaggtttgttacatagctatatgtgtgccatggggggttgttttaaagattatttcatcacccaagtattaagccaagtacccattagttgtttttcctgatcctcttcctcctcccactctccaccctctaataggccccagagtgtgttgttctcctttatgtgtccatgtgttctcatcatttagctctcattcataagtgagaacatgcaatatttggttttctgttcctgcattcgtttgctaaggataatggcctccagttccatccatatccctgcaaagggcatgatctcgttccttttatggctgcatagtattccatggtgtatatgtaccacctcttctttatccagcctatcattgatgggcagttaagttgattctatgtttttgctgttgtggatagtgctacagtgaacataggtgtacatgtgtctttgaaatagaacaatttgtattccattgggtatatacccagtaatgggatggctgagtcaaatgttatttgtgtctctaggtctttgaggaatcaccacactgttttccacaatggttgaactaatttacactcccaccaacagtgtataagtgttcctttttctctacaacctcaccagcatctgttattttttgacattttagtaatagccattctgactggtgtgaatagtatctcactgtggttttgatttgcatttctctaatgatcattgatgttgagctttttttttcatatgattattggctgcatgtatgtcttcttttgcaaagtgtctgttcatgtccttagcccactttttaatagggctggttttttttcttgtaaatttgcttaagttccttatagatactggatattaggcctttgtcagatgcatagtttgcaaaaatttccttccatacagtaggttgtttgtttactctgttgatagtttattttgctgtgcagaagcgctttagtttaattaaattccatttgtcaatttttgcttttgttgcaattgcttttggcatctttgtcatgaaatcttttcccatggctgtgtcctgaatggtattgcctacgttgtcttctagggtttttatagtcttgggttttgcatttaagtatttaatccatcttgagttaatttttttatgttgcataaggaagaggtccagtttcaattttctgcttatgatcagccagttatcccagtactacttattgaatagggaatcctattgcttctttttgtcaggtttgttgaagatcagatagttgtagatgtgcagtcttatttctggattctctattctgatccataggtctatgtgtcagtttttgtaccagtaccattctgtttttgttactagagccaggtagtatagtttgaagttgggtaacatgatgccttcagccttgttctttttggctatttgggctcttttttgtttcatataaattttaaaatagttttttctacttccacattgagaagaatctcagtggtggttcaataggaataacagtgaatatatgaattactttgggcattatggccattttaacaatattgattcgtcttatccatgagtgtagaatgtttttctattgtttgtgtcatttctgttttctttagcagtggtttgtggttctccttgtagagatctttcaccttcctggttagctgtattccctaggcatttattctttttgtggcaattgtgaatgggagtttgttcctgattgttgttaatatttaggaatgctagtgatttttgcacattggttttgtatcctgggactttgctgaagttatttttcagcttaagaagcttttgggctgagactgtggggttttctagatgcaggatcatgttgtctgcaaacagggatagtttgacttcctctcttcctatttggatgccctttatttctttctcttgcctgattgccctggccattacttccaatactatgttgaataggagtggtgagagagggcatccttgtcttgcacaagttttcaatgcttccaagttttgcccattcaatatgatgttggctgtgggtttgtcatatatgtctcttattattttgaagtatgttccttcaacacctagtttgttgagagttttttttaacatgaatggatgttgaattttatccaaagactttcctgcatctattgagataatctggtatttttttctttagttctgcttatgtgatgaatcacatttattgatttgcatatgttgaaccaaccttgcataccagggataaagcctacttgatcgtggtggattagctttctgatgtgcttcagcctattttaattccctctgtgatctgtaatgaaacagaataagaacacagataataatgcacatgtacttgctttactgctgaaatagagaaactctggcaacagctagctttagtttaacagttttacaatctaaagtcttgaaagaccagagtgaattccaaaattgaccaaaagtagggctcaagctaaatattttatctcttttagttgtttttcttgttttttttcttccccaatttatctgctctcattcatttttagtcatgaaatgccctcttttctaacttcctttattgacagtaaacaaatatttttgagttcctgttaagagctacactgggtagattttagggaaaaacagtgaatgagataagcttcttctgtccctcccttatggatctcatactctaatgtcagctatcaaaacctgtgtgtttcttcttaaaggtttatataggcaggacttgaagcatggcaaactaaaaaggcaagctagtggctcagagggactggagtagggatcaaacagtagctagcaattcagatgttaaataaactatgggaccctaaacaaacaaacaaataattaaaaaccctgatgtgttgttttataatatttctataaattaggaatatgctctaatagtttattttataatacataaagctttgcaaaataggaaaaaggcttatctgataaagaaaaatattttatagaatactttttaaatactgttttttaattttcagacacataaaattttaaaaaaggaatgaaacatttccaagaggaacgttggtttaataaattaggttcttcttcaagtgccatcttcaacctataaatgacgccacattatatgaaaataatttttaaaattagattaaatgttcatctccattatatttttattatttaatactgtctcttgttttcacacattttgcaaagataacctttctcatacactgttgaaatttccaaaagctacaaattatttaagtcttaattagtaaagcttcaatatgggaaattttcctgtacattctgaagccagtggtcaacttaatcaattatgaacagcccttgttccactagcaaaatatattgagtaccttgtagtatcagggaagttttatttcttttttttttgaaacctgaaacaaattttaataccgtctctttaaatattcaccatcatttcttatcagattagagcacagcagatgtgtccaaatctttgttttatctaggtgaaaggtgaacacatttataataaataaaaattcattgtgcccttatgttgttattaaagacatttttactgtataaccctgcttttaaaaatacctaattatgcatttaaggtctttttctattttagttttatagtataaaataattatcttttgcttacagctaatatctcaatatctaatgacaccacactggccccagagtatttgccaactatgtcttctactgacatggtaagtgacttactattttaaattaccttcatactgactgcatattgtatacttgtttataatacttataatatatgatgtcttctaccactcagcaattctggcatgaacacatacgtaacaattattgacagtggagggacgggaaaaaaaaaagccactttcctttgctctagtcagcactttttttttatttgccttaaaaaaagctgaagccaatatttacttctataacatgctttttaaaacttcttagaatttaactgccacattgcattaattgtaacctcgaaatattttcacaagggaaaatgtgagaagttggaaaatgagagcacagtatcctctctctgtttctcgtatggttaagaattcttaccaaccaaatggtgctgtgttctcttcactaagagtgattgtagcaggacctttcccctgtcacttagaacggactgtgcctctgtcacatgatatcctttcccatggctggtaaccaaggatctttaggagactggaactaagctttaaaaatgagctgttttgcatggaaggtcacacactggaaggaggcttttgtattggagaaaaaggggaaagtgctgtttcagacttccaattgtgctccttctatgctgaacatggaatcttaccaaagaatatcaatctttcagttataaagacagaagccataataccttgtgttgatagagtgcccatctctcaggagacccggacatttctacagatattatgtagtgagtgccctaacatccctttcaaagatgatgttttgtatctttcctgggcaactctcacgtgaccctcttttttgtttttatattctgtggctctcttgactgctttttttgctgttaaagtcttctctgacttttctcaaacttacttctctatttcttccatgtttgatgttaggtgtgtgaaaaagtatgtgtatatgttttaccacatgcatacagaaaggagttcaactttcagtctttcaactggtcagcctattgcctaaaaggtcttgcctaaatacaggcaaaactgcctccttctagatttgaaagaattttattcaaaattcttatagtaaaaatataattaataaactataatttaataatatatattttaattaaaatatagctaatatagttaataaaaacataagttaatttgtaataaatattagtgaaacactcacttccactgacttaagaaaagaaattgttatctaacttaattctttttgtaactaatcaagggaatcattaaaattaatgaacttttaagccctgtcgttgggaagtcctggcagaaactccagcaattgatatgtattaaaacaaaatgttacaataaggttcttgaaaaaaaatggaagttctgattgacttctagtgtgactgtgatagagacatagaggcataatgtcatttcaacttagctactatttatagaacacctactagagaccacatgtgttacacatattctcatcattgtagaccttaatatgtactataaccatcaacataaactaccagggttaattacttctattttatacatgagagaaactgaagctccagagggtaaatcacctttcttgctttaggtcacatagccatatattagtagaacaaagatttgaagtgaagtctgggtggttcttagactggtgccattcctcgtataccatgatgcttcaatgtacacaaatggcaatgtttacccttccagttcctatagatgccccatattccagggcagcaatcccttcatatgcatcaattgcataccttaattaaaatgtgaaggtgctatgttcagcacctctagggaaagaagttagaagaaaaaatgtgtgtgtgtgtgtgtgtgtgtgtgtgtgtgtgtgtgtggtcatgaaggccaacttttattttatccttcatttctcctttttcatttatatcattacccgtatttatatgttgtgtatacacacacatacaatataggtaaatgactcagaaatgagttttaaatatgatttattaccatcaatcataatgatcaattattgaggcacctactaggtgccagactcttcacagtaattgtctataattctcacaatcactttatgagttattagatgttacccctattttatagatgaaacagagacttagaaaagttaactgacctcccaaagaccatacatattacaagtacatggtaaaatgaggatttgaactcagggttttctgcctctagaatctgccttatttctgtcctttcaggaagcagcatagtgttttatgtagaggaactcacagatattgagttcttgtgtcagactgcctggttcaagtgcagggctccatgacttaataagctgtggaaccttcttagtttcccatctgcaacatcgggatggtaatagtacttatctcaaaggtactgtgagtgtcaacttaatagataggcagaacttggcataatggatggcatgtagtcatctctcagtcagtgttaggtattgttactgttctttctaggtattatcatttgattaggtcatgcagcctccataactcagaagtttaatggagagaggaaattgggaagcccatcttctgagaggctattgcgtcctccgtctgcttggttatgctagccggctctcctatcctgaacctttcctaggacacacagtcatcaggacttaattttccttttttcatttcagccataattagattgtgagagaaggtacaggaaaagtgacatgcatcccctggagccagcaaggcttgctctcacaggccttcagtacatcctgtcagatgaaggaaggtcttttcccttcagcttcactagcatgaagacaagctttctttttcatggtggtagggatatgtttcagggaaaagagcaggagagaggggtattagagcatttaaacagagattagaactctaggataactatgtctcaagataaaaaggcaggttttaaaatttccatttattgttggaatggtgtctttatttcttctcactttctccaatttttctatagatttcttgcttggtatatccctttaacttgcaaaccaaattccttaaaaggttcctgtaaacctttaaaattagccacagcttgttcacactgtatctagataatgagcattaatacctgttggcttgcagtttccagctctcagagtgtgagacaccagatttcaaaatcaaatgtcagtttcttctgaagaagtgattgaaaggatcagttagtattttgtttttccacatcagattccttttttttaaattgaggcataccttaaaatacacagttctgaagtattcattgaaatgagttttgatggttgtaactactatccaaacaagatacaggacatttccatcataccagaaggtcccatggaatgctgtattttgtttgataccctagctttctttttgggggatctttctttgcccaaatactctgcccctagccttcagatggcagatacctgagccctttccaaagtggttgaatgcctcagagaagtttctctcagctctgcttctctgcctcccatcttaagaaagtggcttccttacacttaagagaggctccatgtatctaagggggaactcttttagctttcctgtccaacccccagtctttcgtgtattacccatgcacttggcaaagaccgtgagaaaatttggtgagtggatgcagacttgatctatgcctaggactcctctgaattctgctctgtcaccccagtctgcatgtagccattaaaaattcgttaaatagaaaaattagttgggcatgatggcacacacctgtagggttatagtgagctacaatcatgccactgcactccagactgagcaatagagtgagactatgtattaatatcttaaaaataagtaaataataaaataaaaaatgtttgacttttttcctcatcttaatggtgagttttttaaaactatgatttttatagggtatctagcttgctttggttgttaggatgggagtgatggcctctcacaattttctataatcccaatcacaagcagaacaaccagtttatcttgatgtcttataatggtatagacaactgtaactcaaatgcatgctgtagatgataaggtaagatttcagattactgcaaatctggctcaccactgtgggggaaaaaactctaaataagtacatcaacaacttaaccttgaggcttttattagtggtatcactctcatttatatttttaaaagcacatattttatcagtcagtactcaaaagggctacagcacgtcctcagattacaccacttcattgtaacgttgatgaaaaaaagagaaattgactctcaggctactgcctatgtggagtttgcatgttcttctcatgtctgcatgggttttcactaggcactctggtttccttccacatcccaaacacatgcatattaggttcattggcgtgtcttaatttcccagttagactgagtgtgggtgtgtgtgtgagtgcaccctgtgatgagatagtgtcctgtctagggatagttcctgacttgcaccctgagctgccgggataggctctgaccactcacaaccctgacctggaatgataataattatcttacttatttttactaatctttcttaaatgtatgtatagctcacatttattttaacatttaatattagaaatgttttgatctttatttagaagtttggtgatgtttttgtgaccaggaatatgccatagggacttaactcttgcttatagtgattagcctatggtaaaactggtggttatacattcattttgcttaaagttccagtttccatgaacctattgatgacactgaggatctactgtaatacagaacctttaattattatttttattattattattacttattatactacccagagatgctgttaatcatgggactaagaaccttcatgatgattctaggaattaacattcatttcatgggaaatggaatgtcgtattaatattcttgtgcaaagcatccttgtgattttctctcaccgagaaagtcaagtgtaaaaaccattctgtccttaaatctccttgaagattacatattcctacttttaaaagtattacgtaaaattttaaatatgcactaaaatagaataaagcagtgaagccccatatacgcatcacctagcctcaatggctttgaacattttgtccatcctgtctcatattatccctcactttttcctttagggaggatactgtggtcttttaaattttaaaataaatcctttggtatgcatactacttttcagaactgcgagcagatccactcagtataacagggtaattctcttgaaaaagatatctcaaaaaatagattgaaatctcttttcatgagatttaccacagttaagatcctcagcaacttgatcattttctttaaatcttttcccccagtacccatttacctaaacaatctgcttcagcccatctggtctatccgctgttagatccccacacaggtgagcattcagtaagtctttaaaactgaatgaagcattgtatgttcccatatcagcatctttgctcttgatgtctctctctctaatactttacttcttttttgctgccagtgcagaaagaaatgcacatctaaagtttgtcgcttttattcccttttgttacagttttgctgtccttctgctcttactcctgctgccctttgaatacgagagttctgcaaaaaccagtccctcttttagggcttagtttaaattttgttttctctgtactcaatgaagatgattattccctcttctgaccatctgatcttcataccactcatttagatacttccttttactgggttatattattagttaatatttaagttaacatactttatttctctagggaaagttttaaaagttgttgttttatttatctttattgtacctgtaaaggttacattcgttcattcatgcacttaggtctcagtgcattttctattttcctgtggccacatttttctattttctagatgtgactgttaactcaaaatattctatatctaattgaaatagttttgccagatttagcaaacaaaaataaaacatgcccagttaaagatgaattttaaataaatattgaataattttagtataaatatgtcctaaatgttacatatgaaacacttatactgaaaatactatttgttgtttacctgaaattcaaatgtaactgggcatcctacattttacccagcaactctaaattgaaagtttattttaatttaatcttgtcctccagataaaaagagtagataaattggtagatatcttccttgaatatgtcatatattccagacatgatgacagatttcgtttgttcaatcaacaatgatttcttcagtgcctaatgtatcccaaattgaattctgctactgtcttgctctgctcttttctttttttttccttattgatgcacagtccctttggtcctcaggcaccatacatttatcatttttagcttttatccatccttagtcaaaacagttactaagtcctgggacgtctctctctctgtctttctctctctctctttctccgtccctctctcttcctccctccctctctctctctcctttctccattcttgcatttcccatcaatctcttttccttttcatccccctaaccagattatttctcatccactataaacacctcaaaagtttttgccaaccccaaagaacttgccttaaccttgcaatttgcatattctaacctattcttttgttatagtatttcttgaaaaaatagtctgtaattgctgttgcaattttttcactcccacgcatttctcagctcattgtactttttttacccatcactctgatgactttttcatagtgttttgtggtatcttcacttccattgtggataccctagatgttttacactcttttttcctgcacatttttcccttgtagttttattgtcttacaactgcaatgatcagctctttcctgatgactcctaagtagatgtctctaaacttgacatctctcctagatctaggtctcagacccactagatatctctctgaatattttcaaacttacaacagtgaacattgaggaagctacaataaattgtaataaaacattacacgcatcgtaaggaaaacagataatgtgctaagagaattctaacaggcagaaaggacttctgagattgtgttcccatttgtcttgttctttgttttcttcagagacaggattttgctctgtagcccaggctggcatatagcggcacaatcatagctcactgtaacatcaaactcctgggctgaagtaatcctcctgcctcagtctccagagtagctaggaccacaggcatgcaccacttagcctggctaattaaaaaaaaaaataatggagatgaggtcttgctatgttgcccaggctagtctcaaattcctggtttcaagtgctcctcctgccttggcctccctaaatgctgggattacagatgtgagccaccatgccagtactgtcttgttcttaaagttctgatttaaccgtttaaacagtatgtatagaattttgcataggaaataaagatcaaaaccatagagatgtgagaaccacttgtaagggctagagggcagtagcagtgagatgagttaagggtctcctgtattaaggccagaggagacaacagtggcttgaacatcaggtgtagcagtggtcataggtaagtttgttggtgaaatggaccctgcctgaagttttatggaattaaccttcactgacatcagcttatatggaacaataatattgaaataatacagataatatagatgtgttttcagtgatatctaaatagaattgtttattagctagaatttaagttttatgggagtaggaaactttgtattctgaaatgccaaatatgctgagatatgtgcatgccacctacagtttttatactgaagtccttaatgaaaggtggtatttggagactcaagtttctggatagtgatacaaagaatcatttgaggcttacaaaatagtgatcatttggcattttaagttgatgtaagcaagaagacatgtctgtcatttcatgtacatctgtatagtcttcacctcaacctgaatctctgtaagaaaatcaatagaacttcctgtcaggattgctttaatgcaacttatctgtgggcaactctagttatagagaagaattctgctggtattaaagtgctgaagtgaaattatgttaaatttttgctgattttaaaacaaagaaacctgttagctattatgacttctaaactttaaatgtatgctgctgtaaacatccatatgcagaaacctcaaaaacaaaatgagatatgattaatcacctttcagaagcagagtttgataaaagcaagaatgcagttcagctgtttacaagttgaagcttctataggaaaaatatttcagggaaagatatatagtttgttttttattgacttatgtaagcactttaccttttgagctctataaaaaaatgaactctttctgggaagagattcttcttttatgactatattactcatatcatgacaattcattgaatagtaaaagacattgatgatgtgtttggtgtgaggtagaactcttgtcttcaaaggacaggagaaatttatctttccacatttatttgcaaggtgttttcaaataactcttctgatagcatatgacatatccattagccctggacctaagaggagtaagttatgggtatttagaatggttctaagctgagacacccagtcccttccacccaaccacattggcatccatttagataggtacaattttgaaaatctcttcccaggaaagagccagattgtcacagtatgcaagaaagtgttgtgcatagcaaaagaaacttaggtaaaggatatttaagaagattcaaacatcagtataagggcgatctgtgcagaaattttattaagcaaggggatgagcaaccaggagactgcttgtcacataaaatgttcaggcagagaatgaatgttcatctttcaggactattgaatactaagggtgatagatctgattaaatcatccaagtttcctccaaactctgatattttagaaaaggtttcttaggcttagaggccattaacttttggttgactggtaattcaagtaagtcggctgttatagaagcagattcagatatagggatttggggtgcgtgtgactttattgagacagtggtctcaataaaagcagattgagagaagcagtataagacagggaagtagttaaacaaggatatggtttcagctgagttttgcttcagcctgatcccatgggagctgtggagcataaattgtgcgtagagttgctctcacctggagacgaagagggtatagttttagaccccggttagtattggtcagtaatcggctatgagagggcactacattgcaggtgaggtggctcttaaatggctaatggcagttctctagagaaaaagacagctgtgaattaagagcagctagtactcagagcaactgggggatgggtgtgctggccctatctactatgctagcaaaaggattctcctatgtattagaaacaaaaaataggaacaagagtgagctgctagagggaagcacagcactgaccccacaacagccatacatgaaaactgaccatatgtttgaggccatgtaacatggagatggatattccatacacaactacatagccttaaaggcatcacagcacatacaaagaacagatgctcataatgctgacctagagtcaagaagaaaaaaatctatactttattagaatatgcaattgaaaaagcagggaccatccatatttttatactttaattgcttaaatcaccagtccctagttatttagaaaagaaacagaatagttgtgaaagtgcttggtgagtagttaacctattacaacttttagagcattaaccatagggccatcaggtagacacgtaagaagctgtgccttacaaaggtaagtactttttgaaaaagggaaccgttttagagagtcttacattttgagacttagaatattaatgtgtctcagtttactctcaggaaggtgtgcaggaaagaagtactttgtggtttctattgaacaagtgggcgattttaaggctgttgcccaaactaggtaacaaattgcatcattctcattgtattttcaacaattgccaccctcttggcccatcttatctgttattccatgaacacctcatcaagtttcaccctccagtgcttattttcaaactgttttacagaaacttttggtataattcctatagctcatcaagtatcaaaggctgctttttatatgtcaatgttctctagaaaaattttaatgtttttcttcttcagtaccataatactacctttgactgggcatttttgtcgaagaaggagtgttcaaaatacggaggaaacctcgtcgggaacaactgtaattttgttcctgatatcacactcatgtcttttatcctcttcttgggaacctacacctcttccatggctctgaaaaaattcaaaactagtccttattttccaaccacagtaagtacctgaactttaaatgattttcattggatttacactgtatcaacaataatacaactttacaaggtgaaaaaggcacctgtaattcaatgtgtccaatataattttgtgcgttttaaacattacacttcaatctttgttcatgtgcatacttattaacgtaagtctagtcaagctttggaaaaccttccaaggactttctcacataattctgtcatatacctctcataattctgaatgtgctgaaaggaaaaaaaatgagatgaattatatttaaaaatgcatgagtgaagaaaaataccttttaaattcattgtgtttaagtacataatcaaaaactcttcatgtttatcaggaatttccatggtgtagaatttcttcagcagctgtacatttgagtattttagtacttgaattatgggctgtgggagtaaacttaaattgtgttgttacacaagtattggtgtaagatatgactgtcatatgagccaaactttccttcccgtaatgatgaatgccgtagtacagagaaacagataattaaactgggttgtgcaaacatcctgtctcccattaaaatgcctgagtgagcttagtccaaactgtgggttcatggagatgctataagaaaagactaatatttagttaatggcattttggttttttgcctgcagaatcaaactaagataatcctttgctttacagttcagttcttagtgtttaggatgtcagtatttcttaggcaatcttgattacacctgatttatatcagtgacctgctctgtacagctgacatctcatgaaacagctcttcttgcattatatgtaaaaggaatggaagaattttaaaatatgagatgcacttgatgaaattcctttttccaaattctaggaaatgaaaatatatttactttcacctagaaaatttttgactctctgattcttcttacaaaattgaaaataaacagaagggttgataatgaaatgtctagaagtagatagcccaaggaatgaaaaatttccacaaagtgaaatttagaaagaagcattcaacttagtctgcttaacatgggcattacaagctggtgatccacaggcagaaagaattcaacccacagccattctttgtttagcccacagtgtgtatacatacaaaaaaacacactctctctctcttacttgagacttttggtagaatctgtactttgcagatagttactgttttcccagctctgtgttgtctaagaattggctgtttcatgcattcagattaactgcctgttcttaaagacactgggaaatgtgctttcttgatacacctcttcaactgtgtgggttttgtgtagaacagattcctgggtaaaagtctttgaggacaattttttttttctcttgaggtttttccttcttaataagtaatttattgggcatcttggattttgtttgtttgtatttttggcttatactttgtaaatcatcaccacctgccaaagtctgatataatttaagtatagtaagtagaaaagtggaaaatttgtgaagcacttataagtcataatttgcaaaataaactagtttcaactttgagatgaatggagatcctttttctaaattttaaaatcttaattgaccaataataatgtaaactatatatttctggagtacaatgtgacatatgtatatgttgtggaatgattaaatcaagctaattaacatatccattacctcacatacttattttttgtgatgagaacatttaaaacctactcttttagcaattttaaaatatacaacacattattattagctatagtcatcatgctgtgcagtggatctcaaagacatattcctcttgtctgatactttgtacgctttgaccaatatcctcccattccccgcctccagtaggcaccattctactgtctacttatatgagtttgacattttaggtttcacgtgtaagtgagatcatgtagtatctgtctgtctgtgcttggctcatttcacttaacataatgtcttccagataacataatgttatccaaattattgctaatgacagaatttcctttgttttatggctggatagtattccactgtttatatgtgccacattttctttattcatctgttgatgaacacttaggctgattccatatcttggccattgcgaataatgctacaaagaacatgagagtgttgacatctctttgagatcatgatttcatttcttttggatacatacacagaagtagggttgctggatcatatagtagttctggtttttattttttgggggaaactttcatactgttttctgtaatggctgttctaatttacattcccaccaacggtgtacaagggttaccttttctccacatcatcaccaacacttatcttttgtctttttgataataaccatcccaacaggtgtgaggtcatatctcattgtggatgtaatttgtagttccctgatacttcatgatgttgagcattttttcatttatcttttggccatttatgtttcttcttttgcaaaacatctattcaggtcctctgtctatttattaggtgaattgctgttcagttttagtttgatgcaatcctgtttgtctatgtttgcttttgttgtcaaaaaataaccttatgttgaagtgtaatgataggttatttgatattaacaataatctttgcccagactaatgtcatggagcttttcctttatgttttcttttaataattttacagtttcaggtcttatatttaagtctttaatccctggctattttcttttttttgtatttttagtagagacaggatttcaccatcttggccaggctggtcttgaactcctgacctcgtgacccactcgccttggcctcccaaagtgccgggattacaggtgtgagccaccctgcgtggccttaatccattttgaattgattattgtatatggtatgagatgagggtctaatttcattattctgcatgttgatatctagttcacctagcactatttattgaagagattgctgttaccccattgtgtgttcttggcatctttgttgaaaatcagttggccataaatgcatggatttattcctggactctgttctatcccattggtctagatgtctgtttttctaccagtaccatcctgttttgattactatagttttgtagtagattagtgtgatgcttccagctttcctctttttgctcaagattggtttggctatttggggtcttttgtgatttgatacaaattttaggattactttttctatttgtgtaaaacatatcattggaatttggatagggtttgctttgcatcagtagattgctttggtagtatggactttttaataataccaattcttcaaattcatgaatacaggatatctttccatttactcctgtcttcttcaatatctttcatcaattctttataatttttgaagtatagcacattcacctccctggttaaatttattcttaaatgttttattcttttgtagctattgtaagtgggattgtgatttttttttcagataggttgttgttggtctatagaaacactactgaattgtatgttgattttatattctgcaactttacttaatttttttattacttctaaaatttttttggtggagtctttatgtaagatcatgttgtctgctaacagagacaatttaacttcttcctttccttcctttcataggttatatgtgtctaggaatttacccatttcttctaggttatttagtttgttgttgtataattgttcataagtatctcttagagttttttttatttccttgttatcaggtgtaatgtctctttttaatcactgaatttatttatttcagtcttcttttttttttagcctagatattggattgttggttttgcttattatttatttatttttatttttaatttaattaattagttaatattttttgtttgtttgtttgttttgagacagagtccctctctgtcacccaggctggagtgcagtggtgccatctcagctcactgcaacctctgcctccctggttcaagcgattctcctgcctcagcctcccaggtagctgggactacaggggcgtgccaccatgggacctggctaattttttgtatttttagtagagatggggtttcaccataatagccagatggtctcgatctcctgaccttgtgatccccctgcctaggcctctcaaagtgctgggattacaggcgtgaaccaccatgcctggcctattttattttatttttgagatggagtcttgctctgttgcccaggctagagagcagtggtgccatctcagctcactgtaacctcagcctcctgggttcaagggattcttgtgcctcaacctcctgagtaactgggattacaggcgcttgccaccgcgcccactaatttttgtattttttgtggagacgaggtttcactatgttgaccagactcatcttgaactgttgatctcaagtgatccaccagcctcggcctcccaaagtgttgggattactggcgagagccactgcaccccggctgattttgtttatctttaaagaaacctcaacttttagttttgttaatttttttaacttgtcttagtctttatttcttctttgagttttattatttccttctttctaacaattttgagtttagtttgtttttgtctttctagctccttgacatgcttcctcaggctgtttattagaaatcttctttcgatgtagtcatttattgctataaatttcactcttagaactgcttttgttgtgtcccatgggttttggtatgatatatttccattctcatttgtctcaaatttattaatttcatttttaatttgtttacttacacattggttatttagtagcatacatattcaggagcataaacttccatgtgtttgtaaaggtttcaaagttttccttattgttgatttatagttttatattgtggtcagaaaagatacttgatatgatctctgttttcttaaattttctaagactagttttgtagcctagcatatgatctgtcctggagaatgttacaaatgcagttgagaagaatgtgtattctgtagcagttggatggaatattctgtaaaggtctgttaggtccatttgatgtatggtgcaactgaagtccaatgttccttgttgattttctgtatagatgatctgtccattgttgaaaatggggtattgaaattcactattattgtattgtcttctgtttctccctttagatagaataataatatttgctttatatgtttgggtactctgtgattaggtgcatatagatttataattgttttattgaatcgattcttttattattatataatgaccttctttgtcactttttacagttttcgacttaagtatattttatatggatacctctgatcacttttggtttccatttgcatggagtatctttttccatcctttcattttcagtctgttgtccttaatagtgaggggatctctagtaggcaaactatagtttggtctttttttttttttgtccattcattccctctgtatcttttcattggagaacttaatttcatttacattcaaggattttattgataggtaaggacttactcctatcattttgttaattgtactttaattattttaatatccttcattcttttcttcctctcttgtttacctctgtggtttggtgctaagctttgtttcttttccctttctcatgtgtttatcagctgtaatttctatctttgtggttgccatggggctaacataatgagtcttgtaattataatactctattttaagctgataacaacttaactttggtcacgttaaaatactttagacttttttgctccctcccacaatttatatgtttgttaccttaatttactttcttatctactgtgtgtttcttagtcactaattatggcttttcttgttttcgaccattttaagtttaaaccttcatactagagattgaaagatttatgtagcaccattataattctgtgtttgattatgaatttacctctactggtgagttttatactttcatgtattttcatgataataaatatcatccttttgtttacagttgtagctcttaagcattttttataagactgatctagcaataatgaattccctcagcttttgcttgtctggaaagatctttattatagctttgctggatgtggtattggctaacagttggtttttgtttccacactttgaatatattatcccattctctcctgactggcaagatttctgctgagaaatctgttaatttcctaatggagattctcttatatgtgacttgatgcttttctcttgcagcttatagaattctctctttgtctttagcttttgacagtttgagtattaatatgccttggagaacattgtttagggttcagtccagttgggaacttttgagcttcttggatcaggacatccatatttctcccaagactttgaggttttcagtcattattttgttaaataggttttctgttattttatttgtctcttctttcactgtcacacatataatgcaaagatttattcacttaattcttatttattttttcctctgacttgattgggttaattcaaaagatgacttcaagttcaggaactctttcatcttcttgatctagtctgttcttgatgctatcagttgttttttttatttctttcactaaattcttcactgccaagatttctgtttgattcttttttatgatatctttcacttttttgaatttttcattcagatcatgaattatttttctgatttcactgaattgtttgtattctatagtatctctctgagcttctttaagatcattattttgaattccttttgatctattctataaatattctttttttggacctcctactgaagacttattgtgtttcatgggggggggggtgttattattatttttcttttttgctttttttgtattttttttaaatatccaacctctattctaattcagggtacatatacaggatgtgcaggtttgttacataggtaaatttgtgccatggtggtttgctgcacagatcattccatcacccaagtattaagcccagcatccactagcttttcttcctgattctctccctcttcccacctccccctcccaacagaccccagagtgtgttgtttttctgaatgtatccatgtgttctcatcatttaacttccacttataagtgagaacatgtggtatttggttttctgttcctgcattagtttgctagggataaatggcccctagctccatccatgtccctgcaaaggacatgatcttgttccattttatggctgcatagtatttcatggtgtatatgtaccacattgtctttatccagtctatgactgatgggcttttaggttgattccatgcctttgatattgtgaatagtgctgcagtgaatatatgtatgaatgtgtctttataattgaacaatttatattcctttgggtgtatatcctgtaatggatatataaaactttatatataaaatggatatatataaaacttaaaatatatccagtaatggatatatacccaaaggctttttctccacaactttgccagcatctgctattttttgaccttttaataatagccattctgactggtgtgagagaggatctcattgcagttttgatttgcatttctgtaatgattagtaatgttgaggtttttttttttcatatgtttgctggccacatgtatgtcttattttgagaagtgtcttttcatgtcctctgcccagtttttaatgggattttttgtttttttcttgaagttccttatagatgctggatattagacctttgtcggatacatagtctgcaaaaattttcttccattctgtaggttgtctgtttacaatgatgatcgtttcttttgctgggcagaagctctttagtttaattagattctgtttgttaatttttgcttttgttgcaattgcttttggtgtcttcatcgtgaaatctttgcccatgcctgtgtcctgaacggtattgcctagatttttttctagggtttttatggtttggggttttatgattaagtatttaatccatcttgagttaatttttgtatatggtataaggaagaggacaagtttcaattttctacatatggctagctagttctcttggcaccatttattaaatggggaattatttcaccattgtttgtttttgtcaggtttgtcgaagatcagatggttgtaggtgtgtggtcttatttcttgattttctatttagttccattggtctatgtgtctgtttttgtaccagtaccatgctgtttggtttctgtagccctgtagtttgaagtcaggtagcatgatgcctccagcattgttctttttgcttaggattgcattggctatttgggctcttttttggtttcatatgaattttaaaatagttttttctaattctgtgaagaatatcaatagtattttacctggaatagcattagatcttcaaattgttttgggcagtatggccattttaacattttaacatattgattcttcctattcatgagcatggaatgctcttccatttttttctgtcatctctgatttccttgagtggtggtttgtagttctcattgaagaggtccacttccatcattagctgtattcctaggtattttattctttttgtggcagttgtgaatgggagttcatctgtgatttggctttcgactttcctgtggttggtttaaagtaatgctagtgagttttgcacattgattttttatcctgagacttagctgaagttgcttagcagctcaagaacctttggggctgagatgatggggttttctagatacagttttatataatctgcaaactaggtagtttgactcccagtttggaaaacgcatttcaggatatcatccaggagaacttccccaacctagctagacaggccaatattcaaattttggaaatgcagagaacctcagcaagatacttcacaagaaggtcgtcctcaagacacataatcatcagattctccaaggttgaaagaaaagaaaaaatgtttagggcagccagagagaaaggcaagatcacctacaaagggaagcccatgagaccaacagtgggcctctcagtggaaatcctatgagccagaagagattgggggccaatatttaacatcttaaagaaaagaaaattgaacctagaatattgtatctcaccaaactaagcttcataagcaaaggagaaatcaaattattttcagacaagcaaatgctgaggaaattcgtcatgaccagacctgctttacaagagctcttgaaggaagcactaaatatggaaaggagaaacccttaccagccactacaaaaacacactgaagtacacagaccagtgacaccataaggcgaccacataaacaagtctgcaaaataaccagctaatatcatgatgacaggatcaaatccatacataacaattctaactttacatgtaaatgggctaaatgccccagttaaaagacacagagtggaaagctgcataacaaaccaagactcatttgtattctgtcttcaagagaccaatctcacatgcaaagacacacataggcttaaaataaaaggatggaggaaaatttaccaaacaaatggaaaacagaaaaaaagcttgggttgcaatcctagtttctgacaaaacagacttcaaaccaacaaagatgaaaaaagacaaaaggtattacataatggtaaagggttcagttcaacaagaagagctaactatcctaaatagaaatgcttccaataagggagcaccaagatttaaaaagcaagttattagagaccgtcaaagtgacttagactcccacacaataatggtgcaagactttaataccccactgacaatattatacatatcatcaagagagaaaattaacaaaggtattcaagacctgaactcagctctgcatcaggtagacttgatagatatctacagaactctctgccccaaaacaacagaatatactttcttctcatcaccacacagcacttactttaaaattgatcacataatcggaagttaaacactcttcagcagatgcaaaagaactgaaatcataacagtccctcggaccacagtgtaatcaaattagaactcaggattaagaaattcactcaaaaccataaaacatggaaattgaacaacttgctcctgaatgacttttgggaaaataatgaaattaaggcacaaatcaggaagttctttgaaactaatcagaacaaagagacaatgtaccagaatcactaggatgtagctaaaacagtgttaagagggaactttatagcactaaaagcccacatcaaaaagctagaaagatctcaagttaacaagctaacatcacagctaaaagaactggagaaccaagagcaaacaaacccgaaagctagcagaagacaagaaaaaccaagatcagagctgaactgaatgaggtagagacatgaaaaacccttcaaaagatcaacaaatccaggagctggttttttgaaaaaattaataaaatacataggccactatctagactaataaagaagataagagagaagactcaaataaacacaagcagaaatgatacagggggatatcacaactgaccccactgaaatacaaacaaccattagagaatattatcccttaatagtgtttataatataaacacctctatgcacatacactaggaagtccagaacaaatggataaattcctggacacatacaccttcccaagactgaaccaggagaaagttgaatccctgaatagaccaataatgagttctgaaattgaggcagtaataagtagcccaacaacccgaaaaagcccaggaccagatggattcacagctgaattctaccagatgtacaaagaagagctggtatcatttctactgaaactattccataaattaaaaggagagacttctccctaattgactgtatgagtccagcttcattcttataccaaaacctggcagagatacaacaaaaaatgagaagtttagccagtatccttgatgaacattgatgcaaaaatcttcaacaaaatgctggcaaaccaaatccagcagcacgtccagcttatccaccacgatcaagtaggcttcatctctgggatgcaaggttggttcaacatatacaaatcaagaaatgtgattcatcacacaaccagaactaaggaaaaaaccatgtgattatctcaagagatgcagaaaaggcctctgataaaattcaacattcgtttatgttaaaaactctcaataaactagttattaaaggaagatacctcaaaataatgacagccatgtatgacaaacccacagccaatattatactgaatgggcaaaggctgtaagcattctccttgaaaaccagtacaagacaaagatgccctgtctcaccattcttattcaacatagtattggaagttctggccagggcaatcaggcaagagaaagaaataaaggctattcaaattggaagagaggaagtcaaactagcctttttatatttcttgtgtctctatgttgatatcacacatctagtgaaatagtcattttttaaaattcatggagtatcttttgtagggagggatttttttttttctgtaaatgggtcttagggtgtcatttggtatagtatattggctttcattctgggtagactcagtagcatggttgccatacattttcttcagcttaatttttgtaagcaatctgtgattgccttagtggcctacttcatgggggtttgtgatggtggtagtgtggttttgctaggctctttagaatgcctgggccagtttcagaactgggaacatttgtgcatgatgggtcagcaggctgtgtggccagcaatctggggtttggggaccaggggtgccaccaggtagcctcttgggtaaggagcatggcagactggctagctgttcagtgactttcctgctttgcaggtcctcttgttcctcatgggtgaagatgccccatgggtttgagcaatgggttcttagttgtactgttggttctatgctttgtacacctggggttgtggtgctgcaggcacctgtgtaaacatggtgaaatgagggtgaggcctcaaggatggagagaagcagtggcttctgggtcccaggacaggattccctctaacagttagtccagtttaaagatggtgccatgccatagcaccttagtttgcagggtagagtatatacaacctgagctcctactctggggcaatgcagctgtgtaaactcctagaaactccctaatctgaattttggacttgtgaggacaggggactctcctgtagcaaggacttctggtatctctggtggctatggggatttctgggggcctccagtttgtctttttgtcataataataaatcttccttgattctgagccaatcccagcaagaagatagtgtgacgaagcagaaggatgccttttcctttgtctatcctgggctttcacactccatagggatttcactgcttctccggatctctcccaacataatttctatcactctaatgtaaatgtaattatttatttgctattttggtccctttttgtggagtggatgagtgccaggcaattctagtcggccatcttaatgaagtctgaaatgaaaatttttatgtcttcttatgaattgatccctttatcattatatgatgactttctttgtcttgtttttttttacttacaatttattttatctgatgcaaatacagacatccttgttttcttttggttgcatcctttcagttttaaactacgtgtgtcctcagaggtgaaatgagtctcttttaggcagcatatagttggatcttaaaaaaataatccattcagccattctgtctttttagtggagaatttaacccatttacattcaaggtaacttttataggtacagactttccactaccattttgttaattattttctggttaatttgtagattcttcgttctttccttcctcttttgttgttttcctttgtgattagataattttttccactgtgttttgatttcttactttttatcttttgtgtgtcttctagagatttttgctttgtggttaccatgaggcttacataaaacatcttacaattataacaggctattttaagatgataacaacttacctttcattgcataaaacaattttgtacttttactttatatctcccccaataatttttttatgttttggattttacaatgtatatcttttaatgttatatatccctgaacaaattattatagcaattatcattttaaatagttttgtctttatcctttatatcaaatatataagtaatttacaccttacaattacagtattaattttctgaacttaactatacacttacttttatcagtgagttttatactttcaaatgtttttcagttactaattagaatcctcttcttttaccctgaagaattctctttagcatttcttgtaatacaggtctggtggcagtgaacttgctcagcatttatttgtctgggaaagtatctctccttcatttttggaggatagatggtattcttttttggcaatgttttccccttatgctcttttttttgttttattttggagatttgtcttttatttttcattttttaaggtgtctttagtatttattagaatgtaaataaagctgagtgctaattttctctaaacttaaaaaatacaactttgatctgggcctttgatacttttggtctattttattttatttattgcacaaatttatggggtatgtgtgagattttgttatatgtgtataacaaaaggttataagggtattaagggtatctatcacccattttcaatacatttttgttaagtatagtcactctaaccttttatcaaacattgaatttgatccttctgtctgtatcattatacctataaccaaatttattctctgccctacccccatcacccttcccagattctgttaactgtctttccactccctacctcaatgtgatcaaattttttagcttccacatatgagtgataacatgcactatatgtctttccgtgcctgacttatttcactaaacacaatgaccttcggttttatccatgttgctgaaaatgacattatttaattctttttatggctacatagttttccattatatatgtatatgtcacattttctttatccatttatctgttgatggacacatagtttgatcccatacctttgctattgtgaatggtgctgcggtaaacacgtgagtgcagatttcctatccctttgatatagtgatttcctttccttcgggtagattcccagtactgcgtttgctggatcaagtggcaattctgttttgaggtttttgggaaatctcaatagtgtttccatagtgactgtggtagtctaccacagtctaccaaccatataaaacatttctaccaaccatataaaacatttcctctttctctgcatccttgtcaacatcttatttttggtctttttagtaatagctactctgactggggtaagatgatatctcattgtagttttgatttgcatttctctgatgattagtgatgctgagcattttttcatatacctgttggctgttactgtgtcttcttttgagaaatgtctattcgtgtcctttgcccacttaaatggaattatttgtttttcttttcttgagttaagtaccttgtatattctaaggttagtcccttgttggatgaataatttgcaaatatattttctcattccataggttgtctcttcattgtgtagattatttcttttgttgtgcagaagctttttggtttaaatcccacttgtctatttttgtttggttgccaatgaatttcagatcttaatcataaattatttgtctacaccaatgtccaggagaattttccctcggttttcttccagtatttttatagttttgggtcttacatataagtctttaatcaatgttgagttgatgtttgcatatggtgaggtaggagtccagttgtattcttctggatgtgggtatccaattttcccagcaccatttatcaaagagggtatactttacccaatgtaagttcttgtcagcttttttgaggatcagttagctgtaagtgtatctttatttctggattatctactccgttctgttggtctacgtgtctatttttatagcaatactatgctgatgtggttactacagcattgtaatatatcttgaagtcagataatgtgatgcctccagctttgttctttttgctgctcaggattgctttggctattcaggcttctttgtggttctatatgagttttattaaataggatttttttttctaattctgtgaaggtggcagtattttgaaacagatcgcattgaatctgcagactgctttgtacattatggtcattttaatggtattaatgcttctgatccatgagtgtgggaagtttttctatttgtggcctcttcatttcatcagtgttgtgcagttttctttctagagatgtttcacccccttggttaaatttattcctaggtattttattttattgtattgtatctcttgtaaatgcaattaccttttaaattattttcttggctagatcttggtgtatagaaatgcgactgggttttgtgtgttgattttgtatcctgcaactgtactaatttttttaatcaaatctaagagatttttgatagagttttggggttttattagatgtaagactgtatcgtcagcaaagaggcacaatttaacttccccttttccaatttggatgtcttttatttctttctcttacctggttgcttcagttaggacttccagactgtgttgaataggagttgtgaaagtggatatccttgtcttcttccagttcttagaggaagggctttcaacttgtcctcattcagtatgacattagtggtgggtttgttgtacaaggcctttattattttgaggtaggtatgttccttctattcctagtttattgagagtttttatcatgaaaggatgttgtattttatcatattgtttttctgcattgattgagatgactgtatgatttttgttctttatactgttgatgtgatgtcacatttattgatttgcatttattgtgctgagctatccctgcatccctgggataaatcccacttaattgtggtatattatcttgtagatgtactgttggatttgggttgctggtattttgttgagaatttctgcatctgtgcttatcagaagtattgacctgtatttgtctttttttctattcttgtctgtttttggtatcagggtgatattagcctcatagaaagtattaggggatgatatggtttggatttatgtccccacccatgtctcacgtcaaattgtaatctccagtgtcagaggtggggttggattatgggagcaaatttcccccttgctgctctcatgatagtgagttctcacaagatctggtcatttaaaaatgtgtagaacctcccccttcaccctcttcctcctgctgcagccatgtaggacatgtctgcttcccgtttgccttccattatgattgtaagtttcctgaggcctccccagccatgcttcctgtacagtctgcagaactgtgagccaattaaaattcttttctttataaattacccattctcaggtaattctttaaagtaatgcgataattgactaatacagaaaaattccctcctcttcaattgtgtggaatagtttgaggaggattggttagttctttgtttttggtagaactccacagtgaatctatctagtcctgggattttcgttattgggagacattttattactgattcaaaatcactactaatgatggatcttttgagattttctatttcttactgattcaattttaattggcatgtttccaggaatttatccatttcctctaggttttctagtttattattctatacttgttcataatagtctctcacgatctttgtatttttgttgtatgagttgtaatgtgtcctttttcatttctgattttacttggatgtcttctttctttttttcttgtttagtctagctagcagtttattggctgtgtatattttttgaagaaccaactttttgtttcattgattctttgtatttttttagtctgtatttgttagttctgctctgatctttattatttctttttttcctgatagttgtggatttggtttgttcatggttttctgtttccttgatgtgcatttttagattgttaacttgtaatctttctacttatttatttattactgtaaacttccttcttcatactgttttgctgaattccacaggtttgggtatattaggtttttattttcagttgtttcaagaatttttttgattttcatcttaatttctttgttgactcaaaggtcattcagaagcacgtttaatttctatatatttttataaatttccgaagtttatatttgtatttatttctagttttattccattgtggtctgagaatatagttgatatgattttcattttgtgaaaatttttagaaattgttggtggcctaatctatggtcagtcctggataacattccatgtgctgatgaaagaaatatatattctgcagttgttaggtagaatgttctgtaaatgtctgttaggttcatttggtctaaagttcagtttaaatcggtgtttctttgttgattttttaaatctagattatctatttaatgctgacaacggggtgttaaaatcttctactgttattgtattgcattccgtcttttcaggtctagtaatatttgctttatgaatctgggtgctccattgttgggtgcatctatttttagaattgttatatcctcttcctggattggttgctttatttcatataaaatgacttttttaaaactgttcttgactcaaagtctgttttatcttacgtaagtatagctactcttgctcacttctggttttcatttgcatggaatatctttttccatccctttagtttcagtctatatgtccttactggtaaggtgagtttcttataagtagcatatagttagatgctacttttgtaagtccagtcagcagttctatatcttttaagtgtagaatttaatctgttaatatttaaagttattatttatatgtgaggcttcatttctgtcatattactaatagttttctgttgttttgtatattctttcttcctttctttttctcttattatttgtggtttgggggatttctttttttttttttttttttttttttttttttttgagatggagtctcgctctgtcacccaggctggagtgcagtggcatgatcttggctcactgcaagctctgcctcccgggttcacgccattctcctgcctcagcctctcgagtagctgggactataggcacccgccaccacgcccggctaattttttttgtatttttagtagagatgaggtttcaccgtgttagccaggatggtctcgatctcctgatctcgtgatccacctgccttggcctcccaaagtgctgggattacaggcgtgagccaccgcgcccagccaagggatttctgttagtggtactatttgagtcctttttcttactcttttgtgtgattgcttcaccagtaatggctgtgctcccaaaatggtgccctgccatagctgctcaggtcttagtggggtgtgagtgacccagtgcaaattcccagtctggtgtactgccccactgggtttctaaaccaccacccttgctaatgtcagtgttcatgtgggtagaggagctcttctgtatttcagattgcagccgactgtgtaagggatgtggaccactgaagttctcttaattaccctttccctgcaatatggaacccctctagtctttctagccacttgctttcttccttatctgtgcctcaggtgttttctgtgagttccttcttggactcttgtggtctctcctatgtgttctattcgaggtatgtttctctagtcataattttggttcttctttctggaaagagtaggtgtctgtagtcagccatcttgcatcagaatccttcttcagctctttgaatatatcatcccagtctctcctggattgtaaagcttttggtgcaaaatacactgctagtattgttggaactctcttgtatgtgatttgcttcttttctcttgctgcttcaagattttctctttgtattatattttttgtcaatttcattatatcttgatatagtatttttatgttgaatctgattgaagacctttgaccttcctatagctagatatttatatttccctagatttgaaatattttctgctattatttctttaaataaacttcctacccctttgtctctctctttttcttcttgctctcctataacttgaatatttgttcttttgatcctgtcacataaatcttataaactttcttcattctttttattgttttttttctctactgactatatattttcaaataacttgtctttaagttcacagattcttctgcttgatcagttctgctgttgatgctctttattgcatttcttaattttcttaattatattttttggctccagaatttctatttgtttttcttttaataatttcatttaaaattttgaatgtaagtaatttcagtctctgttacatttctagttttggtcatttattgttttcttgattttgtagcatcctgtctttttagaaagtttgctgggcttccttaaaataattattttgaattcttcgatagttcatatatcttcatttttgagggatgattactggggctttattttttcctttagtggtgtcatgtttccttgattgttcttggtcttgtagctcctgatttgtttctgtgcatttgaagacatagagactaatttcagtccttgcagaatgtctttgtctggaaaagtttttcaccaatcagcctgtctagagattatggcaggttttctgttgtgttccacaggcaggcttgctgcaggacttcccagttaggctgacctggttcttgtgtaaacaggtgagtgcacctggcacctgggtccatggtttggaactggagcctaagtccttgagggcaggcctggggcctgggtccatgagggctggcctagaacttgagtctgtaggagtggtccaggagccttggttcaaggagtcttcctggcttcaggatgtagtggggtgggtgtggaccctgtgtctactagagcctggctccatgggtaccagcctagagcctgaggctggcttggtgctggggtaggtgtagagtttgggatcatagaggctggcctaatgcctgaagccaaagtgactggtctggtgcctgtggctgtgggggccagcctggaagctggttgtatgggtgcttgcctggagactaagtctgtgagggctattgtgggtcatgcaaccacagaggctgtcctgaaacatgggtctgctgaagtgggcctggatcctagatctgctggagtgtggggcttaagggtctagcctggagggtggagccacagggactgacctggtactgggcaagcctggagcctatatgcatggtacttacctggtgcctaaggccaggggtgctggcatggttctgcagcaggcctgaagtctggggctctctgggctgacctcactctacactagtctggaacctggggtgggcctggagcctgaggccacaggggctgatgtgatgctggacaggcctggagcctgtattggcagggactggtctggaggctgggtctgcagctggtgacctgaggactagggccatagagtctggcctggtgctgggggtgttcagagcctattatacctggggttaccctggacctggggctcatctggagcctagggccactgggtttggcctggcagtggggtgggcccaaagaccaagtccccagagcaggccaggagcatgggattgctgagccagcctggtgtgggggcaacccggatcagtctgtggttgatcctagagtctggggttctctaccaactagagtctggggttgtgggggcctacccttcatttgggttttaccgggacagacctggtgttggtgtccaaggcaaagactggtactcatttccctctcctctcaaacagagggtttccctctccaggatgtgttgcctgaggttgaagaaggggtaatgtggagagtgtaaaactgtccttcctaccttcttcaatgtgtcttttcttatttctatgttaatctgttcccttagctcttgtgaaagtattttaatcagtgcctagttgttcaaatttatgtttctgcagggcaatgaccattggaaagtcttagtctgccatcttgctgatatcatttcccagactaaatagaatggtcattttaactttctatgtatccaaaaccttttccttctggcagtaacacccaagttgaggataactcttcagacttaaagaaattctcccctcataagagcctaagcaggtaatttctcagtcattgataaatattgctaagaatgtcatgacaatgtaaaactagaataatgatagcattctagttacaattcttttaaagaaagttctcagcatagtttagaattgtatataccaaattataaaatacacagagaggagaaagtatgtgtgatttctaaaggtcagtgtgtaactgtgtaggttttcagtctgtcatcctcccttataccccaactcatttcacatttacagctaagtaataatatatacataaatacatatgcatacataaatgaatattaagaacatcattttttttgacagagtctcgctctgttgcctaggctggagtgcagtggcatgaccttgggtcactgtaacctccgcctcctgggttcaagcaattctcctgcatcagtctcctgagtagctgggtttacaggtgtacaccaccatgcccagcatattttgtatttttttgttgttgtttttttagtagagactgggtttcaccatgttggctaggctggtcttgagctcctgacctcaagtgatctgtccgccttgccctcccaaagtgctggtattacaggcgtgagccactgcacctggccaagaatatcatttttatctctcattcgccaaaatatgttttaatttaagctgacattttaaaatgtggtttctgtaggtaggtgcagacaggtgtatagattctaatatatattcttaaatagtgttttataattaaaacatatgcttaaacattatacataagacaggcttttatagctgtggaaacaatcaaggctatttttagttccttcctcacaccaacaattcacatgaaacctctaaagactcaaaatgctcatgttgagtgacaatgttcttgccatgcaaaatgtctcattctcctttagcttacacagtcatttctcttttgttctctcatttttaaacatttgtatgagttgttaagactttaaactactttaaaacacttagacttctcttttattagtcagatcaaccagcacaaggtcggatacagactaagtactcaatacttcttgactagtggaaaccagtcaagtacagattagtgctgcattttgtgggaagagcacaatgtgtgagaatccaggacctgtagattctagtgccagcactaccactgactaacaatgtgctctttgatagctatctacaaacttcagttacctcacctataaagggaaagtttggctagatgacaattaacagccttttgagctctagtactttataaatttaaggagttttctggctccatttcctatactcttctaggcttatagcaatgattgaaccttacaaattagcaaaaaataattatctccatcatatcacatctgccagtctctctttgtggatgattcacaattgtcatacagcaaaggcaaattcaaaacatggttgactttcttgtcaaaattgaacttactcatttctctgtatttcttttttttgggggggtggctaggggtgggagagagagacggggtttcactgtgttacctagcttgatctcaaactcctggcctcaagtgatcctcccacctcagaactcctggccttgagtgatcctcccaactcagccttccaaagtgctgggattatgggcatgagccactgcacctggtctgatcaaaattttaaagtcatatttggtgtatgagtcaggattccatcaggaagcaaaggatatgctcaagttaagataatgtgaggttttgataaaggcattatttatgacaggcatgagccaccacatctggctccttatattccttatctcagctaataacatcacctatccttagggccacccaagatcaaaatcttttttcttctcctttattttttttaaatgagatgaggtcttattcagtaacccaagctggagtgcggtggagtaatcatggcttactgcagcctcaaccacctgggatcaagcgatcctctctcctgtcttccgagtagctggaactacagtcacactccaccaggcctggaaaattttttatttttatttttgtagagatggggtgttactgtgtcgcccaggctagtcttgaactcctaggttcaaacagtcgtcctgcctcagcctcacaaagtagtgggattacagatcttagccaccacacatggtctgatcaaaattttaagtcatatttggtgtatgagtcaagatcccagcaggaagcaaatggtatgctcaaattaaggtaatttgaggatttaataaaggcactatttatgaaggtgaggttagagtatatggaaaccacagaagatgtggtgtcccagacagtgagactggggagcccatagtcgaccacacaggttaacttcctaaggcagagagtgtggtagagggggatagaggatgaatctggtgtgacaaagaaagatgtccattgcatgtggcactccaggtttttctttatcaaattaaacttatcacagtccttttctgataagtttattccactgcagtctttctcctttacacttacacttcgattccactcgttctggctcccattacctttgctgaggcccatggtcaatgacccagtctctttccatacctcacggagccactagcaatccctcagtatgaacacttaaaatgaaacagattaccttttctaccctgtctatcaggtatttaatttgtgtattagacagttctacagagccctaatgctcagtggaacatgggtcaaataccagtactccattgacagtcttttttgtattcaccatcctttttaaaggggtgtatcagtctgttatcccacactgtaactggtctgttctatcagcctcgagtctttagtcagagtctttagtcaaattctttcagcatcaagacttccattaggaatatcacagcataatctgtgattttctgtggcaggtggctcagggcattaacatgaaatgttcttccagagtcctacaccaacaaatgatcataaacatggaacaaagatgccatcacgcaccttatgtgcctatgtggtggcaaatgaaaaccatagcttaaaaatagagcaggattggggttagtagaaatcagaaagccacagatttgtggtggcaaaatgaaaaccatagtttaaaaacagcagtattgggactagtagaaatcagaaagtcacagaaccgcatgaattaggcaaaattattgatactttgatatagtcacattcagtgtggctggcatatgtaacaggcccaagaatgccattcttaaggaacttcttgattttctaattttcttccttagaatatgcattaattctaaccctcacatgaattggtgtaatcataagattatttttaatatacttccttgttgttattgtcatttaaataaacaaaatcactaaattccaggtaacatcaatagctgtaacaccttctatgctatatttagataatgcagaatgttctttgaagtgtggcgcttcagaaactttaatgaaaacataatgagcattttagttaggtgacagcatttagtttttattgatgtaagacacaggaaagtctagaattgtacaattagctgtattctagaaccatttttttaattgacattttggtctgtggccattctattaaaattgcatgtgtttaggttataaacagccctttacaagaatcagatgacatccccattctggtttcttttgctctcaaaaattatcttggtgaatggtaaaaattgtcaaactaaaacaatatattaaaacaggagtaagaaataatgggcatgtattatatgtctcactttagtgttcgccatcttgggtggcatttgtcttctttagtgacaacaaagcaaacgactctgctatcactaaaggagaaccagattttcaaattcttgaggtattttatatcaaggaaaataatttttaaagtcaaatttgtttttaatccaaaattgtttttatacttattttcttaagaatgacaaagggatatttagttataaatgcaacttagtctgttaaacatttaacaaaaactatacaaatacttcagttcttacagacatatgaccaaaaataaaaacacagtcgacctgaattgagccccaagaaaaataggttgggagcagtgattggccaaaacatttcgagaaagcttttagtggttgcaaagaggtagtctgtggatagaagtaataactttaaccatggaaacctcttggtcctgagcactttcagcttatttatccatcagagaaaagtcaacaacattgaaatccctgcactaacacaaaatggtctcctatcccattttgggattgtctaagttatacatatgactgattaattattatttttaaacttttactcttgtgtattaatataaattgtaaaaccatcttctttttaggccctggaaccctttatgatagtgatttatttgagttttatctaagataactctattagaggttcaaggaatgttgataatttggtcttaatgaattttagtgttaggactttaaacaccatctagtgtaacatcactgctgacatgtgagcttcatgctgcttgaatgcttcctagaacaggaacctagcatcctgcaggcattcttgatagaaacacaaatctacctttccgtagcctctgtccacagggtctgcacttgccatctggagctacacagaacaagttaatttctctttcctgtgatagacttcacatagttgaagacaaattctccctgcaatgtctttaggcctgccatcatttttcttgtgatgtgttttctgtattcccaaatcctccggctgaccttttctagattagctccagattttcagttttaatttagaagatagtaaccagattgagatgtagtattttccatgtggtttgatcatttgcttctggtatacacacattgggtttcttgttctactgtgttcttttgagacagaatggaagaaaaggtcttttagtgattgccaaagtctcctcagcatctttgctgaaccacttcactaggcttactctccttcctgtagacttccattgtcaagctccaagcccgacccagataaattctccagttcatctctcttctttgctcctcaaatctctttgacttagaacttatggcactaaaatcgtagagtcaaaatcagactttccttttattaaattctgattatagtgggtattattgaatcaaagtacagtgaattaggattattgctatgactactattaatgcttttttttttgcatagtgctttatagcattggctactggggggtcatatttcaaacttttagggtattttggtgcctttttgtgattaccaaaatagccataattgtctggcataatttttctttcatgtaaaataaatgcttttttacactgctgtttagcattttccaagcaccacaatcactagaggaattgacatcataagttaaaatgtactgagagcccacagggtgcctgtcgttgtccttgtctctttataacagctgtatccattgagaactgctctgtagactcatggccctttccctccagttaatttaggagcagctgcagcccttgcaaagtgaaaaccaaatgtcctctgggatttccaagaaacctaattcatttttccactgtaaattaactggcttctcactgttagtgtctctatgattgtgactctctcaataattaatacagtatcatctttcatggatattatgtttataatagatttattaagttgttttgccaaagaaggagagaacagcatatgtttatttgaatttccttttccatccacttaatttcttctttgctttggtagtttaaatatttaagctgctggcttcttattagattaattgagatactgtctaattaatcccgcagaggacagaaatattattctcctcttcatttttataattaaaaatagtaaacaaaaatgaaagagttcaaaactagtctgatataaaaaaggcattacagtcttaactgagacatgcttctctttccgtctttcataaattgaggtagaaattatatgctgtagcacatccatgtatcatttttaaaaacttttttcatggcaagctcttgctatctattaattatcttaatttgtgttctcttagattgtgataatttatattcctaagatattgaagtttgagcctggagagacttaacatttgatttggatggacaaccacaatttatgatgtttgttcaagctagatttgagggctctgaagccacaggtttgggcatgaactcttgagggaacaggttttctcatgaaaaccttggcacttctacttttaaccattaccagtaacagctgttaatagtagagaattaggaactatgactttctaatttgatatctttattgatatattgacctacatagcaggatgtttttggagtttttgaaagagatcaagtttgatgaaatgaaagggaaaacaaatgatgaaagaaaatcacatactcttcttttctaaatgcgcttaaaactgtgagaagggcccaaagagagcagttcttatctccttaaagtcggactgagaagtcttatttacagaccccattgtgtatctagtagactatgtactcattgctagacatttttagggcactttctacttctactatgtcagttttgcctagctcaaattaaagtttcattttagtatagagtaagacatgaatagcctgctaaaatagcacccctacctgtcttctctaattaggggatttagagttgaatataacagtggtctggggaaaatcaatttccttgactgtgaagtttaaactggattcaagatctcagaaatgaatatcttaataataaacactctccaggagtgatttctgctgtaattaaactaatattatacaatttaaggggaaggaagtggaaatagaagtttgtatgttatgcagactatatcaccctgactgtgatttttaatgaggttaagcaacactattaatagggtggcttttttctccataaattttaagaactgtaatcctgacatgtattaacatgagtgtttttagctacttttatgcctgtactgtaataatgccacacttgacaagtaagtgccatcacgtatatacatatgtattatgtatatacatcatattatacgtatcattaacatatctctgtttgtttatatgttattagtttctatggctgttttgtcaagtcaccacatacatggtggcttaaaacaacaaaatttatatctgagaggtcagatctggatgtcaaaattgagatctggagatcagaaatctgaaatgggcctcagtgggctaaaatcaaggtgtgggcaggactgcattccttctcgaggctctaggggagaatgtgtttctttgacttttctaccacctaggggctgcctgcattctttggctcatgactcttttcttcaactttatagccagcagtggccagtcaagtctttctcacactttattattctgacactgattctcctgcctccttctttcatttacaagaacccctgtgattacattggacccacctgtttaattcaggctaatcttcctaaactagtggattggcaacattaattttctctgcaaccttaatttgccctagccatgtaacattacatattcacaggttgtgggaattaggacgtgggcatctttaggggtatattatactttaatctgcttaccacagtatctgacttaaattttaagatgagtacactgggtgctatgttaatagtgcactgaaggggcgcaagtgcagaagcaggaagactatgtaggaagctaatgtagtaaaccatatgagataaaatggtggcttaaacagggtggtactagcaatggaggtgatgagaagtggcaggatcctagacatattttcaacataatttgctgaccaattagatgtgggatataaaagaaagaagagttgagtatattccgaagttttaggtctgagcaatggggaaaattaagctggcattaattaagatagagaaaactattcaaagagcaggtttagggtgtcagtggtggggcagtgtgggccagggaagaggagccagggggagatcaagcacttagtttttgcataagtttgagatgcctggtagtgattttagtcaagcaggtctgtcctccaccagggccagaggtataggtcctatgggaatttctgccaaagaattgcagattgaatttacttgccaccgtgtatttcccttctcctctttattaaaaaaaaaaaggaggagagctatctgccttttaaataactatttgtcttccttcagtatatataaaaaatccaagtggaggtgtcaggtagttagatagataattctggaatttggaagagtggtctagcctagaaatataaattttttgttctttagcatgtaaatggcattttaaagcatgagagtgaatgtaatcacttagggagagaatatagataggaaagaagagaccaaagtctgaactctggaacactgcaatctcaagagtttggaggagttgaaaggaaaccagcaaagaagaactagagtagccagtgaagtaggatgcaagtcaggtctgctagatctgatttccaaaatgtcttcagaatgccatagtattcttagatcagaacatggtaactggtatattacagacagttgcttttgaaaaattatattggataattggactatttccatacacatatcctgctatcagagttccttccggatccactgatagttctgcatttactctctgtccatgtaatatgaggtttttgaagtttaatgagatactcttgagaatatatgttaatgccatctttagagggtgatatatctgtgtaggctctgtattaaatatgagagttcagaatggagtaagaaattcagttgcttcattaagctacagaaattataattttaggagatttgacaattttatattcttttgaatatcctcattgttgacaaatttcttttgctttgaatggatttaactttacagagtatctgcagtaatttgtgtgttgttgaatagagcgaaaattggaaaatcaatataacattctagaaggtaattggcatcatataccaaaacacttaaatttttatatagacattgatatagtaactcttctgacaggaatttattctaaggaaacagtcttatatatatgtgcaaagattttttttatgatattgttcattatagtgaaaagttaaaaacaatctaaacagtagagtattagaaaaatagattttaggataaccattcagcataatactatggagtcaacaacgtataatattatggaaaatatcaaatgaaatagaataaaagtggaaaaatcaaaatatcaaacagtatgtgaaaaattctgtatgtacacatatatatggacataaatatgtagaaaaggatatatttgcaagtgttaaaattcatctctacatagtagaattgaaaaacattttcttttttcattattttttctaaatattctacaatgaacatatattaattttgaaacaaaaaatatatttcaaagaagatagaattatggttcttcaggcatgtgcgatagttaatgtgggtaatcaaacagtctttgctcagtactaaaactataaaaggaatttttaatttttggaacaatagcaacaccattaaaagaaatggatagcttcccaaagagaataatttgaaaaacagccctgatttggatttggaagttctgggattttgagggggtgttggggtacattttaaattgagctttaatttgcatagtaaaattcacagattatacatttgtgtaaccaacatccaaattaaaatacagctggtatatttgtctgaaaaaaaatcattgtttttctttcaacagtattataccttaaataatttcttaaagcagtatagatctttcagggcattttctctttgttggtacttggaatcatgcgtcttgatctcactatctcttggagtagtgtggccaaattagcagccccatacatgggctctcagtgatgaggttcagtttgccatgtaggttttgcagggcgtccagtttatggaaagctgagaatgcctcctctaccaactaaagaagcagaattgcccaggtgcctggtagtgactttggtcaagcaagtcagtcctccaccaggaccagaggtatatgtcctatgggaatttctaccaaagaattgcagattgaatttatttgctcccatctatttcccctctcctgtttattaaaaaaaggaggaaagctatctgccttttaaataactatttctcttctttcgaacaacttataggatatttgtgttgcccactagttgcattttctaggtgaggattgtaagggtggtaaataagaactaacttccattttgcctttgcaatgacctctggtcctccagtgatttatgacctactggtctagaggggtgtttgtaacttcctgacatactcctgaactgcttcataggaccatcttttgccagaccaccctgaactgccagtgtcaacactacttgcacaaaacttaataaatgagttttctccagtattgagcccctaagaaacatcctttttttgctgtgactccagatacttctaaccaaaattagctctgagtggcagttccatgtcattaatgggcttttaattttttatttcttggatttgaagtttcatttcaaagaccacctgacagtagatcatttagttattccagtggtctgcagccatgagaacttctagaacttgaaataacaataattaacttatattaggagagtttattatgttccaggcaatattgttaagcactttcatggcttttcttacttaattctgataacaaaccaatgaagttgtagggattattttggctatgttttgcagatgaagtaattgaagctaagaaagggtaggtatttacaaataggaaataatggtgcaggagttccaatagtggttgtgctcccaactgctgtactatattatctacccaaattgattcctgccatctattggttcttaacattattgtgtataattgatgttaagttgctcataaaaggctggccttctcttcctcagtatgtacttttcaagaaagctaaacctagcaaatctagccctccaagaaagaaaggaactccaggccaaaaggaacagctctgatcctgctgctagttagtatcaggctcctgacacctggtaaaggtcaagcattgaacactagggcttttaccttacccaccttgccaagtaattttcattcctcattttagtttctgttgactacctggctgcagtaatactattctctttcaagaaatcctttgtcttcagaggcgtgcatccactcagcccatcactgatctcccttccttcatccagcagcatcagaagctgactgctcaccctgagataacttcataacctctgactcaaccttggttttatttaggagcaggcttccttgtatataacttggctatgagcttcatgaggacatgaattgtatcggttttatttactgtggtatccttagcaccaagaaaagtattgggaactgagtaaattcttgttgaatgattaaattatgtgctaacatgtgtatgcaccgtatgggaagctcaggtatctgtgctctggtaatgcccttagtcctcattagtgccactagagactacagaacaatctcaagcaaacaaatggtatatgctccccttaccaacttgcaaatggccattattcacccacttcatgggaatggtcatagtttaatgctgtattccttaaagcccagaccttgtcctgaccagagaaatttggagagttatcagataatggcagtcacatgcaagaagtggtagaggagagatgtcccacatacgtgagactttaagtactaacctggattgagaaatattttatttgacaaaactagtgcagctgtgacatttctatctttcatcacttgacattactttgaggtcttgatatttacttcactcaagggacagaaacttctaagccctcccatgctagatttttggtgttttcaggctgtcttatgagatttatcttactctgtactcacagtgctgcctcccaaataacacacagaatttctatgttgttgtgcagatttttataatatgtacttagttttcattcttatgcaggtgaccttcatgttgcaagcaggatgagtttatacagtatctcaggggtacgttctatttgattgccctccctgcctacacacacacacacacacacacacacacacacacacacacacacacacacagaaagagagagagagagagagaaagagcgagcgcaacctgttctttgggatacattacattatctagccaggtgatgtactaatacaaaaacaattttaaaaataatttttctgcactctgatacctccttcaatttgttgatgaagctgttgctataaactattagcaaatacaaagttcttcattcagttcaaacacagacaaatatatgtatctggtgctaaatggttcctggtttcttttttatttttccaggcaagaaaactgatcagtgattttgccattatcttgtccattctcatcttttgtgtaatagatgccctagtaggcgtggacaccccaaaactaattgtgccaagtgagttcaaggtaggtgaatgtctatcttttggtcattcctggaactctttttctttctttccccctattctaatttattgtgtttctctttgagttagttttgtacaattatccatattttttttccaaaatcagtccctcttaggctcatatatacatgtagtttaatttcttcactacaattaaatgtcaagactagggtttttatttaaaacaactgataatactattataaactctggcttatagttttagaataaatatccaaaatattttatataacttattaccttgatctatataatgactctgggaaatacgtattgtaactatcatcctcctgattttttcttttttgagacagggccttgctctgttgcctaggctggagtgtggtggtgcaatctcagctcactgcaacctttgcctcctaggttcaaagaatcctcccacattagcctcccaagtagctggtgctgtaggcacataccaccacccccagctaattttttaatgttttgtagagacaaggtctcactatattacccagtctggtcatcatcctgattttataaagttaagattgaagctcaaagaattaagtaaaatgcctaagattatggaactagtaatgtcaagatgtgaagttagaacccaagcctccagaagtctagtctaatactcttttcatgctatgaaactacctaccacacgcatgtatatataatgtgaattgtaattattacaaagtagatataataattacttaacttacgaacctattgatatgtgtaggtaatggataaaatttacattccagtcattcctaaatatattcctagctaatttttcactacaagtcttttatctattttctagaataatcctccttccctccactactgagatcatatatttgctaagaattattaagctagttgcagttttagtttaataactgcttaatgaggaagggatatatatgttataacacacattattttttgaattgtctctgctatcacatattcattagtaaagataagttctcacccattcaaccattaattcatttgagttaatatttattgaatattgagtcaggctctaagctggaaatttgaaatgcattgatgagtaagacaaatttttttccctgacaagctcacatctgctaattgtagtaaaatgaggttagattcagtgacagaattatgagacagatgatgggaatgtcctcagaagagaagtgagactttcttgatagcaaatatggagaaaataattcacagtgttctattttagttttttatttgcattgttgaatgtaaggaaaagcgtaggaaacccttttttttctgtagtagacatatatgatctactgatggaaaacagactaagaactgcaaaaatgacagttttttccagtttttttttgtgattttcctaaaatttacccagttattatagatcattatttcatatgtaaaataagagaccagaatttttacattagttcacttatataaaaacagttatggctttttatatatattatgaagctgttaaaattcggcaatagtataaacaatttcattataattgctaaaacccatgaacaaaattcatggtgatttggtaatttcttgctacctttttactgaatttcttgctatctttttactttttaccttttactttttacttgctacctttttacctttttacatttggagttttcttctggctactctttaaacttaaatcagtttcttccattttgagtccttatcttaaaccatcccaaatatgcaaaatgccattcacttattttccaacagcccatactctttctctactttctttaaagaattgcctcaaaaataacatcctttgggagagttttggtgaataatcttcattctctagctcataactgtttatatttctcaatatgttggttatccaaatataaaagcatgtcttcccgttggttttttcaccaaatagtatatattaacctgataattttctgaaaaatgtcatctgtctttttcaagccaacaagtccaaaccgaggttggttcgttccaccgtttggagaaaacccctggtgggtgtgccttgctgctgctatcccggctttgttggtcactatactgattttcatggaccaacaaattacagctgtgattgtaaacaggaaagaacataaactcaaggtaagtgtccataataatgtctgtcattgccttctactttctttttagtacttgaaaacactaattgattaaaaaccaagggagctttgttgggagttactatagctaatgttccttaagagtccgcagaaccagagatcactttgtattggtacatgtcttcaatataacactttagggagagctcatttaaatctgaaaaaaaaaaaaggtttcaaatcatatttctttcaccagcaaagagaatacaaacataatttactatttagccacagtcatcctacatctgattttagtggagtaactatcctcaataaagacaatgacaatcaaagatttaattaatttatactgagcatctgctttctcttaaatcaactcaggtttattcttaaagattattcagatagttcatggttgtaagctggtggtgtacatcctgttttttgtcttcacatacttgtgtcagtatgttattaaccataaagaagggagaaaaatgctttattttggacattttaaaaatcagttattaactttgttatgagtctaaagaaaatgccttagtggtctgggatatctttcaagagagctgcctaaaatgctcttactttatataatgtttttccagctccagtgacttttttagttgcaatggatttttacaataccatttgaagaagtgagatatgaatggtaacaataataagagctattatttagtggagggctactatgagccaggccatcttctaagcactttgtattatatattaactcgttaacttttcataaccaccatatgagggaagcatgaaaatgcattagagtctgttacccagaaggagaggatattactaagaatagagttcaacacagtaggtatagcaggaaaaatattcaggaaatataaagaattggctgactacagaaacccattgagcagaggaatgagagagatgaggaagattctgataaactatccaagtagggagaacttaaaaagctgtagatcatggtaagaaaggagtaaatcccataataataagaccaggagaagaaaattaaaagctttggtcaaagaagagatgtttagattttgagagtttggaaggagagaaagctgagattgatgaactggtccaaagcatgtggctagctcccgaagcatgttgacaatgacgtccatcaaaacttgtaagttagagtaatgtgagtctggtgaactgaaagtatcacctgcctcaatattgatatgattggaaagtggcacagagcatggtagagaagaacatcatgggaaagttgctaaaaccataagtaaaagtatataactgtcctggaggtcggcatatttagtgatgtggaagggcagaatgaagaataactgggcttcaatacaaggcagttcataaagcacgaaaacaagtgaggtatgctcccatctaacatggagagtaaaacaaacaaacaaaacaaacaaaccaacaaaaaaactagactgtcactaaagaacaaatctctgcaagaaatcagtgctcccaaaggaaaccaagtggttttcacttatgatgaaagaaaaggttgcaaattcagttggaaaattacattaaaatgactttccccctatgcccactcctgccgtgagtagatactgtactgctctgagatacttttaattctaagatcattgagcttctcacattctggtaatgttgggttatttgcacttgttacatggcagctgacttaagaattaagaagtggaagatgctaggccattaaatggttatatctgcaactggcacagccttacttctttactttgctgtagtcaatgggtcaaaatagtcacaggggcagcctccattcaagggggtgaggggggaattctccttttaatgggggaatggcaaggtcgtattacagaaaaccgtgtaagataggagatgttttccagccatttttggaaaataaaatctgctacatttgtactgaaaaatttgccatagtctagatcttggtgattgcttccccgtggtatcatttaagcatatatacatatatacatatatacatatatatatatatatatatatgtatatatttatttatttatttatttttagacagagtcttgctctgtcacccaggctggagtgcagtggcttgatctcagctcaattcaacttctgcctccggggttcaagtgattctcctgcctcagcctcccgagtagctggaattacaggggcatgccaccatgccagctaatttttgtatttttagtagagacgggtttttgccatgttggtcaggctggtcttgaactcctgacctcgtgatccgcccaccttggcctcccaaagtgctgggattacaggcatgagccaccatgcctggcccatttaagcatattcttctgtcttctgtgcttcctttaaattggccatttgatctagaagcttgaggagatatagttttgatattgcatatctatctatctttgtgtatgtgtatatatacacacatataatatatacacacatatatgtatatatgtgtgtatatacatatcctttcttatatgtatatgtatatgtatacacacatatacatatacatatcctttcttaccacgatctacagctttttaagttctccctacttggatagtttatcagaatcttcctcatctctctcattcctctgctcaatgggtttctatagtcagccaattctttatatttcctgaatatttttcctgctatacctactgtgctgaactctattcttagtaatatcctctccttctgggtaacagactctaatgcgttttcatgcttccctcatatggtggttatgaaaaggtaatgagttaatatataatacaaatatgtctacatatatgtatatgtatacacatatgtctacatatatgtgtgtatatattatacatatatgtgtatatatacatatgtgtgtatatatacatatgtgtgtgtatatattatacatatatgtgtgtatatatacatatatgtgtgtgtgtgtgtatatatagagagagagagaaagagagagagaagcccaagactaatttataaaaggccagataactttaaactacaagtttgccttaggaatttcgaggccacagagataatgtgaattccagctctaaacccaattgtagagttgtggttaggaatatccctatcctgggagattctttctttcttttcccttcttttggcattatacccaatggcaaggctgagagaggcatgtgttcccactatctttctctgtggggtattttttttttgattggccaactgagtatgccatgtttagagtgtactcgttttattttgggtggtatctcccatctatgccctctcccacagagcccgagaattggtctctgtcccaagagttcagatggtcattctaattcaggccgtaagcctccaaggattggcacggtctctctcagggcagtcccaggctccagggcttactaactccaaggatttgcttcttcgcgtggctgttgttttttgtatccaattgttcctctttctagtggatgagccatagtttctaaaatatattttctgtgtctttttgagcattttcagatgttctgtattgagagggtttctgatgttggtttagtttaccaaaggctagaaatggttgttgactaatatttttattctgaaaaaaatttgttaacaaattcttaattatgatctacggttggctagatttatcctgtatctttggaggtaaataaatctcctactaatttttactcactatgttttcttattgataaaattcagaatttagaatttcggaagtttaggaatgataaaatacagacatttttaatcttattttcagtagaaaacattagaaaatcaaggtttattagggtttgcctcttaaaataagagttgaatatataaaaaataagttttcatcaccttcagaattgccacttgaaatcattcttttgaataatgagagttatggaataggtgtcagtcttttgtcacaaatctaatgataccagtgaacatttcatcattaatcaaaggcttttcactctgaaaattgttttgttcatattttgttaggaaaggagagctgtggaatatgaacactggagattctgtctaaaattgtaaagggccttaactgctatgaaattgtttcaaaagagaaagctgaaactgagagagatagaagcattgtggtattaaaaacagcatgtttttgggtggcatttgctttggcttccggtcaagtggctctggctgtctgttctgcttgggatgggatccacctttccactctgctgaacacctcagtattgatgtaggaacgccaagacacttggctttctttgaccattattttggttgtttatgccctgcattagccctgcagagtgctcaaaagcaagccagggtcagcaaggtcatgattcctttaaggtcattccctgagtcattggcagaagaaggaatagagtctgagcttcagactgcaaagtcagagatacttctcacaaggaaggtgatttcgagagtgttatagattgggggtaggagggagaaataatttaggatagatatctagaaatagatatgaggtggttgtggcaaccaatttgctctgatatcttttatgggaaaacccttaatttgagggtgttctttttggataactcccaaattcctatttttgccctactttcatttttcctttttatttctactctcataatcctatagactcagtccttttattttatgcctagactcttctaaagggttagccataataaccaatcttccttgcttcattccaaaagccttcattttttttttaaatgctattcttgtatgtcagtcctgtgtttttaaactttcacactttggcccctttaaatctttacctctcaaagaacttccatttgtcctagcctgggttttaagactctttgccagagtaccacgacctaagtttaaaatggctttcttcaaatgctagccagtgctctagtcaaatgaacagttgagttttccttaagcgtgacagtttcttctgctaggtactccagccagaaacctcttctccttacttcctaatgattgctatttttcaaaatcctctccatcctttaagataattcaaatacaaaaacttctcagtgtagctttcacctttaatgtaatttatatttctcttgtttttgctcttagtatatttgtattactctgtggcacagatcacatatttcttttacagtatctgttttgtataattactttatcccttttcttggccaaaatgttttcaaggtcaggaccatgttttattcctcttttcagctctcgtttggcccaccagtttcatatggtagactcaataaatacatgttgatgaattttattctctttggcccacatggctctcagttgttacactgtgtgaaatgggtgataactgcaaaacatataaactctccacttctcaaagtgtgtgcttatattggtcaaagccctgtttagatgtcatcactgcagggagtttttgtgaatttactgtagacatagttaaacacttcattatctgtactttttattatcgtttccaaacctctttgaatctctattcagagtgcattataatttgtgtacaagtctgtgtccccttcttcaattctgagccccttggtgggaggaaccatgtcatggctcttagtgtccccataaatgagcatattgtctggatctttgtgggcccctagcatgaacgtctattctgtgtccctgcatgtcccagtgtttactgctcctcacctctcctttgttatcaactatgtaccacatgtaaactttaggccgctgggctagtctttttctttcatagattttgatttctgtggatttattcctaaatgatttgtactctgtattagtaaagcatatacaatttcaaaaggaaataaagtttcactttctctccttgtacttaaaataatctccagtttcagaaaatagaacaaccgtttggtttgtattcatggaaacaagaagtcttttaaactttaaagggcatatttaaccttttgagcatttattgagtgcttgctatgtatggaacacttgtgttagatgttgaagataaaaattgttctacattgccgtctgtgccctgaaggagtttaatggattttccctattcaccacctgtctattacaacaccaaggttggaattgaccatgcctttctttgtgccttgtaccttgcatgaacattaaattatttgttttcatgtctgccctcaattaataatctgtatctgtcaatgaatacttattaaagaatcatttcctatccaaagatatgagcaaatgcaaaaggcccagggagggaaggagcttggtatatggagaaacatatagtaggccagtgtgactaagacttggggaattaattcattgagatgaggtcaaagttaacggggccaggtcacatggaacaaagtttctgaacttcagcattattgacagttggaaatttttttgttggtggtagctttcctgtgcattgtaggctgtttatcagcatttctagtctctggccagtagaggcatttacaccctccagctgtgacaaccaaaaatgtcttcaggcattgccaaacgtcccttgggagtggagatgagagcaaaatagttctgggaggaggctctgatgtagaaacttaaagataattttgcagcgtttagtttttcattctaagtgaaacaggaatcactttaaacagggaagtggcatataatgatttcgatttttaaaaaagattcattcgtgaggagagtgggttgtcagggacaagagaaaaacagggacgtttgtggtgagagcagcattgagggctgagggttggttgctggatggtgtgaaggaagaaggggaatttgcatggagcactgaaaggagagaatggctttaagcaaatgtcaaggagtagaagcagaatcccaattcaaagagtggcacataggaaagtgcaggagcacagaatatgcaaggcacatttagggatttgtagagtttctggaatccctgagggcctcctcagagttttagatgcaggagcatggaaagggaggctttgtattgctcggccttctcagctgcctgtggcctcccctattcagcgatatccagcttgggcttgatggggtcagaactgcatttgaaacactcagtctggcagcagtgaggatggatgggggaggaacaagagtggaggtgggtggggggagctgagtggaaagggaaggtgggtgggaagaggctgctgcataatccaggagagaaaggatgagaatctgaaaaaggtaatggcagtggggaggaggagtacagaacagataaaaagtttcatatgttatttttgaaaaatactgttttccatatttcttgcagtattctttatataaaaaggaccagtatttgaatattatttttattccattcaaatctagtcattcagatacttttaactcaaagggacatcttagaagtggcttgtttttatgcatatataggtggttttgcagaaacaacttctctgacataaccatttgcattcttgggtctcatggcaatagtttggggcaacatgaatttgaagcatagcttttaccattctgttcaacaaatgtgtctccagagtttaatgtttgtcggacactgtactagacatggtaagccttacatgttgaaatttggcaaaataaatttatcacttttttatctttgaccttgttctccataaactctccccagtgttgttcctttagtttaaactgcatcttctcaaacctggattataacagtgttgtcgtgtctgtcctctgcctctaatcttgaccactcccaatataccgtttatagtcccaacagagccatccttctaaatagaaatctgattatatcacttgcctgcctaaaacccttcagtgacttcctattgctcttgtgataaaaaattccaaagcctttagcaaaacataaaagttcttaacttctctagcctaattttctacctcccccatcttctcctgtgcaccaaatctatttcattttctcagaatggcaacttgctttacatagtttttcacgtacttcttatctctgagctggttatggctcatattttagaactcaacctaaatactacccccatgcaaaccatccctgactttgcgctaagttgggtacccctcctggatgctttcttagcaccctgaattcacccctactgtaggcctttaacactgtggttttataaacacctgttgttttgaccagctctaccattccagtaaaccactggagggaaggactgtgtattatttataactttacctccagggtctagcagagtgccattgaatgagcgaattagcatttattcatttatccatcaaacatttatctatagtatccattctgtggtacgcactgtgccaagtgctagtttggtggtgaacaaaaacatacatggttcctgtcctcatggaactgtgagagagagaggcacaattcacataattatgcacaatgtgacaccgcaaatgtggctgatgttgtgaaggagaaggagatggtatgttgagagggagttccctaatgtgatggcacttatattgagacctaaaatgttagcaagaattagctaaatgaggctgggtgggaagactattttggacacccagagaaatcagtgtgtatgcataggccttacaaaaggaggtacctggtgagaaccagtgattgaaataatcctgtgtggctgcaatgagagagttgaggctggagaagaggtagaggcagaccaggtagggccttcaggtcacattggtgattttcccttccccttaagaacaaaaagaagtccagtgtggctgaggagatggaagactttttgaaagcagtgatgtcaagggaaacagagtacttatctatctgtaattattttatcccagaacctttgtttattctgatggttatatatagttacctttatagtccatcatctaaaatcttcatttcaccctctttcatatgggcctttttgctagtcttggacatatgtaactcaaacttgttttagtggaaatagatccagaaagcatcgagatgatgcagggtaacatgggtgacttttttttacataagctattcttttgacccattcatctggctagtgtccacatccttagattactacaggttttttggtaacaagatttgtggattcttctcattattaccctgctggtacttctaatatggacttcagtgatttagtctaaagagggcataaaaattctgtgatgtctctactgtttttctccttttttacctccccacaaatgtttctcatgtctgtgaatttacaataaagtgttacatttttttcatggctaaacaagagtttataattgccagtaaggggagtatatgcatgctatttttccttttctaaaaataaacatttattgagaatcagctgtgcatcatgcactctgctaaggtattcagaatacagagaaaaaaagatacagtccggtcctcatattacttacagtctaatgtcaaagacagatgaatacatacataatttcagaattagtgtgacgagtgttgtgatagaggaagtcataaaatgcaaagcagggaaacataaaggaggagaactaacctaacttgacttacttatctcacctaggttgaggaaggaaaaccaaccagaaaaggtgagggttaatttaagccttaaggatacataggactgagcgagagaaagaacaaaggaagagtagaggttattccgggtagaagaggctatgttggcaaagacacagaaagcatcagtgaaagaaacacatatgaggcattgcaggtggttgaaagtggtggtggcacaggatccaagcatgagagagattaaagatgaggctgcagatgtgaacagaggccagatcatgaatgaaccatagtggggtcttagacacacaaatagggaggagggagaaaattctgtaggctccaccttaaggtatagccagaacccaaccgcttcttaccatcttcactgccaccactctggttctaatcatcacagtttcttccaatggttatttagtcttactatcttttccctattcgcctaacacagcagccagtgtgtttagaacataagcaaaccatgactctcctccatttcaaaccctccagtggtttcccattatactcattctacaagcctaggttctgatagttctccgtagtacttattactaggtgagaagctgcatattttatttatttatggtattcattgttgtctccctcagtagaatggagactccatgagggcaagattttttttgtctgttttattcacagatgtgtcaccagcatggtactaagttggcagtcaatactcattgaaagaatgaatgactgaaatctcagatatatcatggtattcacctcactagtcattattgaacaaatttatttcagctcatcccacctctgccctcctttcctctgccttacaccactctcaattcaaactattatgccttcctgaaaagaactggttttatgaatgtatattaacctatatctattcataatcccaagtagatttttgttcttagccaagcctggactaggtgaatacatgcttttctttcttgtactagctcccttgcctgtgatgagttctcagaacatgattagatccatgtgcgtgagccaggggtgaaatcttggcatttcagtgagaggagagcagtgttgtgacgaactgtaacaagatctgaatgataacagtcaccaggttcctagtgtaaatcacatcctcattttttaaaaccaacctctttattccttggattggtcatactctggctcttggcactgctgcttccctgctgtgaaaatggactgctctattttctcaggctccataggggtatcaagtatttgatttcttcataaatagagcaaagaaatagaaccatagaataacattgcggacacatttaacaatatttatttaatgagtaaaaaagctagatcttttgttacattgtctgctcttccagtcagtaaatgttattgtgaccattgggcaatgtttgaaatcggcctattctgattaagggagtgtttattacgttaatggtgatatataatagattgttaaacatttactttcacatattatgaaagctgagaaatggcctacataccttctcaatcttgctttcggatccttacataagttgagtactgtctagatgaacagcatactactcagcgctgtccagtagagaaggcagggtgcctgctttcaaggtgcttattatgtttatcttaacaaaaacaaccagtaccactactgccgctatcaccatttattaagcacctatgacattaacaactacagtttaaattgctacaagatgctttgcctgtgttacttcattgaatggtcttaagtcctctatggagtgggcatatatatctccattgttctgattagaaaattgtatacagataggttaggaataaacaaataataagtgtatctttgacttaagtcttaaacagttattcaacactatagtacagaaggtctctaccatagcagctataagatgcagctgtgtgtttaattgctagggggaataatacaaagaagataaagtcccctctttcaaggagtttaacttaccaagcaaagcaagtcagtttcctttggtcatcttaattcccctctggaaatatgactagatagcgaatatgagtcttttcttcacatggttttgttatctctttctacagaaaggagcagggtatcacttggatctcttttgggtggccatcctcatggttatatgctccctcatggctcttccgtggtatgtagctgctacggtcatctccattgctcacatcgacagtttgaagatggagacagagacttctgcacctggagaacaaccaaagtttctaggagtgaggtgtgttaactcagaggaaaatggctcccgaaaacacactgtgcacacatctatgtggcaatcataaggatatgggcagatttggaggagacagggcttgtgatgattaatttattcctatattttttgttccagaaaggactaaattttcatcagaggtttcagtgatttttttagtttactcctcatgatatatcattttcatggatttccaaaaggctaaatgttgcaatataaaactacaaccagattactttttttcaacatgcaggtgattttggtgctgcagtgtttactgtatcacagtcatatgtgaaggccctaaaactcttgagtctgcttatgacttttaagattctgtaatgggaaaggtattcttattttccaattcattttctgtccccataaacactgagaaactttaacctccagacgttcaatttgggtagctgtgaagggcaggagtagaaggtttttatactctgttgagcactttttacagcaaactctgctcataagtgcttgggtagagagctcacatgacagagccatcgtttcccacggcaaaacagtgggtgattcttttttggggtggggagggggtgtaggatgggaattatatttgttgaaaagtacttttgttgttgtagatttggaaattagactgatgtgatttattgtgctaatgaaatttccttgagctgtttgttaattggaatatgggacaatgtaatatctgtctcctatgaaagaaggtgtaagggtaattacacaagaggataaattgctttaaaaaataaggtcttcaaagagtccagtaattgatggaccaagagcaagtgatttttctttcttgattccaaaaggagcaaaaaatttagcaggattacttctttcttcgtgaattcaaatcacatattgcagtcactttaagagatttttttatagttacgttgggtttatacgctatccttgaggtattatttacatgatatcaacacctttgttgttttagccaaacattgattttgtcaatgtgtagtttttttgaaggtgaaaagacaagagcatgtttatgaagacaagaggtagattggtaatcttttgatttggtttcagggaacaaagagtcactggaacccttgtgtttattctgactggtctgtcagtctttatggctcccatcttgaaggtaaatatgtgaaacattcacctcttccttctcagaacactgacatataattggacatgtgaagagtgaaattcctcatgagatatttgcgagattctcatcagttctgtaacacactgaagcaggggtcaagtagaaagagagctttaaatagcttttgtcttgatttccttctcactctttcatcccctcccttatccttagttttgcagttatttgattgaactatattaaattaacaatatccaaactttctgatctgtgaaaatagtagtttcatgcaattgaatcagactgatcttctccccctcctccacacacacattttttattctccttgtcttttatacattctttcttctatcaccttccatttgcttgtatccaaatcttgtccctcttccctcattaggctcctaaataacatgagtgatgcaggataaccattttgatatttttcgactattcttaattattactttgtttctattttatttgaatcagatggccttataattcacaaaggtaaattagagtaaaattactgactcataattagaaagctttagaaatgaacttttgaagaagaaaaattatatgatattggttgtttagaaaattaggggtcaatatataggtttattgatgggttggatatctgcctagatagataaatgcaaactgtatgtgacaacctattaagaagtaaactaaaactaaaaactaaagaaagttagtgtatacctcttcatgaagtttccaattttcttttatgatgcaaacattttatttttttcaatcatataaacatgcttgcgaattattgatagtttgtatcttatgctttatactacagtacaaagcatgcaattcacccatggacctaacagctataaacaaccactgttaacgatatccttccaaattttctcttacaatttttatttttaaacattttaattttaaaggcttttaaaatgctcatataattacataagtaatggggcagtacaatcttctgaagaattcaaacaatatagaagtacacatagtgaaaagcaaaagccctctgttcatctaaagttagcaaattttatgtcagttgccaatcagatgaaattgaggaaagtggaactgtaatatctttgatctgtaaataagactaagattgccttcagggtatttagactgatgtatacagtatgcacaaaatacttgttaaacagttaaaatatgtaattattcatcttttttccttggtttccacaatgtcaatgaactggtttaattaatttctgactggattcatgaggaaatatgtatctcatcttagacaagacattaagattaaaaataacctcagaaaagttgtttctgactatgtacagagggctgtaaaagagtacagagcttatgttctgcagggacagagggaaaccttttgtcacctttgccagtgcaaagcaagttatgggataagtgtgaagatgtggtgactttcacagcattgaatctgctgccaaatgctttatgttcttccgttatcctataggcaccagcacatcagctggtggaaagcctaatgacagtgttaccttttaggcaatggaacctcatccagtgagatcatttttagagagttcactgcagacaattatgagcccatgttgtgagaagctctcctggaaatgaattttccctgtgggttccttgaaggtgggctcacttcaagtaggtgcagagtttcttttatgagctctctttgtgctcagtcactagtgagggataaatgggcagaatcttttcatcagttctaatttactcatcgcctcccccatttttcttttatttttatattatttcttttcattaatacagtataaaatcctaattcaaaaaagtcagatgtgtttaaaagttccttttgtgtgtatatgttacagcaaattggctttattcctagagaatctgacagttgagtaatcatggatgattccaaggggacacagagaatagatactgtataattactatttttaggagagatgcaagacttacattttcaacaacgcctcttcctaactattttctcaccctgcacccaaatatggctgcagaggagttaaagctgaaagttcttttgttctttacaatgattcttttcacccctgataggcaaagtgccttagtatttacagaaacagattagaatgagagaaagaaggcagagagctgtaagagatcagtgagcatgagctttctttccctttgaccttccttaattgatccatacctgggctcatcctcattcagctgctagtgttcatgattgtggctatttccacctggcaattttgagttaccccaagtagtcattgtaagaataaatgaaaaatgcagtccagcaaacgtttttgttaaggttttccccaaaatgtgggaaatggaattgttttggcaatatagtttatagcatactgtacacaacctatatttaaaaacaacaagaataaaacagtcaaggattcgcagttgtgattctttacttcagtaagttaggctattccttacttcgggaatcacaactcctgataaagtcagctactttcagattatgtaccattgaggtttggtaagttaagtgcgtttatcacaaatcccttgttagctcatttgaaaagtcaatacaggaagaagcagatattgagggtacagtttaactaaaacctaagttatgactaagtaagagtcaagattaacaattaaccttagaattcacaaagaaagtggtgtcaggggttatgttggagtaggaaaccttttttcctcccctttgtgactatgtgtttttttagagaaccagaggacaacttaagagaatcattttacttaagagtctgtctttgaaagggcagatcaaatgaatgggaaaagagaaatgtgttacttttactttttaaaatgaaatggctcaacaccatttctgcaaactccatatatccctcacaagtttaatggtctcagatgatcctagtaattttctttcatgcattaagcagtgtaggaagttgtttctcctgcctgtttatgcaagcttactttgaaaatgaagtttttcatttttattctgatctctttgctgaggtccgtcttttatgtggaagaatgtaaggaattacagttttaagttcacgaggataccccttgaccctagccagcaacagtcatacatgcctcaaagcactgaatctaaccactgattcggtactgaactgttgggaagcaagaataactggcgcccctggctggttaaacagcttagttctgtgtttctgcagcagaaatactgcctggtaagtgagtattctgtatggggaaactagaggaggctaaagagcatcaaaaagatgaaaggcacttccttgagcttacttttaccatttttctggcaagtctgaagaaataaaaatcaagtgaagttcactgctacttttgttgcctttgcttgaaatagtttaattcaagttaattaggagtagtcaaatttatctttaagatttgtttagtgttctaaaatcaggatagcatttaatttgtatttggaaaatatttgttgagcttctacaatatgccacaatatgtcactttgttcagtgccagggaaagcaaaatggtagagatgatggtaatggtgatgatgatgatgatagtagtagctaccatttattgagctcggcatttgattaagggctcaacacagatttttaaaatttagtccttcaatgaatgacacctacaaaaaattgtctctcttttacacataagaaaatttattaatgacttaccaggttacaaagttcgtaaataatagagtcaaaatgtgaattcaggcagttctgacatgaaagccaatctcataaccctcagggtttacaaccatttaaaacaaaacatagtacttgctctcaaagaactcattcactttcattttccatgagatgatcttctccagcttctttgatccaacttccagtcctttcatgtgcagataaatacagcattttcacaaactcctcatcatacctcattccagtttcttcaatgactaggaaccagattgcaagtcagtacttccttatcagcttagattttcaagatttaagggaattaggatattatttgaataacatgtttctgaatatagttgttactgctgaaagggcaatatagtagaacttaaataagaccagggctttgaatctgacctttgcagccattcttctggtctgtactcctgccattttccaccctgaccactgaggaccaaggagagttctgctgggcaattgcagcaggcttcttgacttgccagtcaggtcttcatgataattatgacattaatacctcatttatcatttattatctattcagaatgaggccctggactagatattttatgtgatatactctttatcataccctcttttaaatgagaatactgaggataagaaaagttagtaatttctcaatgttacataagtagtagggccagaatttgaaactaggcctgtctgacttttgtgcccatgctcttaatcaggatctcgttctggattgtacattcacatgtacacacacacacacatacacacacacatacacacacacacatacagtgacgattattctgctagaaggtctcactgctgtactgaattctggttggacaactacactctacccttatttttaaatttacccttttctcgtttactcttctgggaatattcaaatactatcagcacatcaaagggaggtataagtgaaaaagagtagaactgcattcaccagaatttgaaaaatttggtgacatggtctgagtatgttaactcctattttgattttatctcaattattccatctgcttgtagggtcaatacttgatttcatgtatggtaatcttatttataattatacttttgtgctttctgggtatgattggttatccataaaatttcctttacataattttatcatttggcaattcttgatatgcctgtatggtatactttgtgctgtttatgttttaattactcctgtcttgctttgtaaaaatatctacctactattactatgtaaattatactggtttaacttaagatggagttccatcttcttaaaatgcatcttctctttcctcctttgagaaatttctattgcaagaaatgattattttgtgatgaatttttaaggattgacctcctgtgacccatgaactaaatccaataaaaagtatcctctaacccaataattctgtcaagtttcatcaagttttccatattggaagatttttattgagatgttgcattatcataaggaaaatggcaaatttcaaaagacatatttttatcacattgaagttggcccaaagtcaacttaatagccttctttatatgtattatttccttttcaacaaagaataactgtttaaaaaacatcttcatatctaaagctatttttctacccacaacccatgccattctatgttactgataccttctgattttattttgtggtagatttggtgatatctgtaataataaattcacagagaatggaactaagcaccaaggcaaaagtgtccttcactttgacattagaaccacattagaaaaaacatttagctaagcctagctgagggatgaggatgaggccagggatggtccctttgtggtggctttctttcaagcaagaaaaatgctttacccagattaaaaaggaactactgcaggaattctaactagttttccatggttgaactatacttctcttttcccttcttacttttctttccttccagctgccccacccccaccacccaccaaattgaaaatgaaatgacaagaaagaaatatgggagatgtttaaaaaatgaatcaaagctatgcaatgatccttctcttagtttttttactttatggtacatttatacacaagaatcacaaggaatagaaacatgcacattgcaaaataaatgaaggcatgtgtcagaaataaagaggcttgagtgtgatgtgttcacctctttgtggtgactgttaggtattacagcttccccagcaggaacatcatccctcctacccccgtcaacattctatgtcacttttagttttttctgacatcaagagcaaaattagctacattaaaattgttagtctttttttgaagaagcatttgatgttttgtatatataaataaggatatttatttcatataaatttaagcatccctatggctagccaataaaaattggaaatatttgttacacattttagaatttactcattctctaatagtggccaaagagtctcagatatggaactactttaggcaatcacaaggagaggctgatagaaattgtgcttcacttagtacgtgcagtatttttaaaattactctaaagccatactatgttttctggttacaatagcctcctttatgtggatttggtaagattggccttaattgacttgcggttttagtattttagctttgaaaaatcctgaaattacttgaacttcttttcaaattctaaggttgagaaccttttgtttttcaaacagaagacttcccagaaacagaatcatccttgatttgcttagtttcctcagtactagggacatttcaaaggtctaggaatagatacagtttacagacatcacttctccttgttaaaacactttgtattaatataaaatattttttgctaatgcatgaaaaggtattaattcagttttaaaagatgtgtattaatccatgtgtgtaattaattgcttccaagtgctccaaggtcctttcaagcagttctctttagttagttctcataatatttgcaagaagcgaggggatagtcttttgatgtttattttattgaaagaggcatctatataccaagctgatagactatttggcaaaaattattaaggacaaaaatgaacagactatattgaaaggaacttgatctcaagagtgaggcaaccatctattaatacctctgtttctgtctacctcacagtccatagaagcatcttgtttacatagttattccttttcagggtgaagggaaacataacttttcctccattaattaaaaaaaagttattagtaaggtcatgcatgctcactaaaaaaacaagcatccaatgaaaattgaaagtccattatacccttcttcatttatttctattacaaagagtttagaagttcatcaattgactagtaaagcatactagttagaggtcactaagttattatatcctatattttagttttagatttagcctttatttaaatgattcctcttcattcctcttttttcttgttatcatttttaagttgtatccatttttttccttctagtttatacccatgcctgtactctatggtgtgttcctgtatatgggagtagcatcccttaatggtgtgcaggtaagtttttgaatagcaatgtaagtacagtagtgtttttctagtagtaagaatagtccagtaacagatctttgaagaaaagtgctaatcattattaactgctgagtttttaaaatgcatttattttctacttcaccattcacctgcttttcatttctggtttaatcaacaagttagccagtattaagaaaagttgccatacatacccattgtttaaataggctgttaaaagtcatttaaccaagaaagcaagaggctataatctttcttttccttccccttacccatctttatctcctttttactgtctcaggaaggatacctaactctttctgtgtgttcttaaagatagtgtttatccatttgccttaactctatactaaaaacaggctattgatttgcttttcacatggctatgatcaataatcaaaagtttttttaccaataaaagaataaagtcaatgtggttgatgtattgcttttgttgaaaacttcagctattcataactttgggaaaactgacacacttttaataaaatcattatcaactgggcatggtggtgcacacttttaatctcagctacttgggaggctgaggtgaaaggttcacttgaacctgagttttagtccagcctcaacaacatagtgagaccctgtctctttaaaaaaaccaaatcattagggagaactttgtaagggactttgtctttcaattgggttttaattaaattggcaccaggaaactggaagtacttatgctgttttctggcaccttgttaactgtagccttatttagcacttagtaatattttaatgggaaaagactgcatgtcctgtgaacatcataagaatttatttgaaccccttcaaaatagtccttgcttttgcttattgaattcagattaatttggttttaaagtcagatagaactgggcaagtggccagactaccaaaaagagaaaaggctactttacttttctctgtttaggtctgctgagtagagttcgtcatcttttggatatttgttacaaaatacaaggtggttcttcatagagtggactagatgaatgtgagtttatttgtgctcatgaaacttttgggaagcataaatctgtaaaaatattttatttttacctgccattgtaaatattctttatttcccaaaatggaaaaatgtgaaacagaaatggcccacagacaaatagttcttatttttatttgctcttaattacctggtctagatcagaagtttaattctatgtgttttaggggctttattggttgaaactcagtgcatgtttatttaattaaaaagaagaaaaaatcaaccacataataatgatggggaaaaacaaccagggtccagctagtagatttcttaaattctgcaatgctattgcccctaatggcttttctctttctttctttctcgattctcccttgtttagacctttttggtaagatttcatttagaaaattttgtaatttgtaaagaaattttgtaacccaaactttataaatgagaaggtcctcaccagtcaaaaatagttctagagggaaaaagaaaaccctttaagtaggaaatcactagagaagattgtgatggtctaatttacttttgcacttctttccctccagaaagaaaatagagatattatttcagagttcatattgcatgattattcaattcaatagctatttactgagcatctttcattgaaagatcctgtgataggttcttgaatatcttcccattcgtcactggcaaggtcaattcggcagttattctttgaagcacagcacctgacacacagatgctcagtagttatttcaatagctgtttatacatcaccatacgatagcatcccttagattcagatgttgaccctgaaactcactgtagtattcatatggcttttctctgaaaagaaatggtgatagattgctgagtgtattagtcaaagtatgccactcagataagtaatatggaatttatgaaaacataatgtattcccatttttaagttggatacttcctttatatccttaaaacattctggaaatgtattaatatatgatgcatagtgtcatctcctctttgttcagataagacaactgaggcagagtaagatacatgagctagacatcttccttcagcatattagtactaaaataggcaaaagatccactttcctgagactcagagagtaaaaatagaaattaggagatgagctcctagaattttttttctttgtgaccttattctttagtggccactttttcttatacatctacataacattcccgcaatataataataaagatttgaagacttgtgctttagtgtgcttgactaaatttctgcattccttgaccattcctttgtcctctgaaaaggacactgcttgcctaaattatagaatataaatcagtagtgattagttaggcatagtggaaatgtaatgcagtaatgcagttggactcctttcctctttcctccccagttcatggatcgtctgaagctgcttctgatgcctctgaagcatcagcctgacttcatctacctgcgtcatgttcctctgcgcagagtccacctgttcactttcctgcaggtgttgtgtctggccctgctttggatcctcaagtcaacggtggctgctatcatttttccagtaatggtagggattcctttaattgaacgtacctgtgagattatatgagtatcatgtggttattgttatatggaagacacacatgtcttttatgtgttgttccaaatttttccagctttgacctcatcactttgatcagttgtaatttacatttcccatgtttatggttgtctaggatggaccttagaatcaggctcacctaagttcagatactggccctcgttcatgctcagcagtaaacttctttgaactactattacctcatcagtaaaatgggagttgcattgttgtttttctgagcatcaaaaattaatatcaagcatgtagcacaatgcctgacacatagtagacaccagtgcatgttaattactttttaaatgttgtataatagaattaatctaagtaagagtgtaggacatttcagttcaagtaataaagaagtgcttggcaacttgtgagaactcatccagtacattagaggaaatggagtgagaagttcactttttacatttcttgtggtttgcataatggtaagtttaaagataaggtgggactctctatccttgtcatagtatgatgagaaacaaggtaaagcaactaacgtttcactctgagtcacaagtgaaagaagagaaaaaggagttctgtatttggcatcactactgaattttatactttaccataactctttacttcttgcaagaaaatgcatatatgtacacttaaaacaagtcacaaagggagcctcaaatctgttttatctcccccacagctttgaaaacagaattttcctacacttaccacattttatttttataagaatcctcttactcttagccagtattattattttatttttcatatttgttgtttgaaatttttttcgtccaaggatgcaagaaaaaatggatattaaatactagtgatatttgttaggtcagatttttttcttaatggtggcttatgtctttctttcctttttttaaaaaaaaactatattaacttactgaaaagcacactgagtatgagaaacactcaaatatacctattagtgttatctgcctacctacaaattttgctgaaaccaagaaaattgaagctagaccaggatacatttgaattatatccaataaatcactttttgcttgtgctaaataataattttaaaatggtttacttttccaaagtgtttttgtcttttcagaacttttatttggtcacaaaataattctgtaatagaagttaggacagatgttatttatttctctaggtgatgaggaaactgtcatatagagagcacgatgctgataaagacaactgcttaatttgaagcaagtcaggatgcctataacttgctgcatattaattttaatatagaataaagatatctttaatgtaccttcagaagttattcttcaagagcaattcatagaaccaaaaatacacaggtcaagaatatttgttttggaagcagacaactgggaccctttgtattattcagttatctgggttcatctccctcacagacattaaggaccttggacaacatacttaatgtctctaaccttcaatttcctcagctgtatgataaaaataataatacctattttgggggtttgttctgaagaataaatgagataatattgcctgagagtttaacataatgtctgggacatgttaaatattcagttaacggtggtgattgaagtagcccagtgaatgaaatggtctatgcatattcaaatactacctcattgtgaatactttgaagatgtcttagtgttatatgtgtcgtacagattttcttgattgctaaaaacctttatgatgttttaatttttaatacttagaaatcatatgccagctatttttttactttaaacttttaattattttatttaaaatctcacatggaaggcaatggttttgaaaaacaatcttttcacattaaaattctaattgaatgtgatcatgcattttggtgaacaaaacaaagtgagtttcaactaagacttttataaaacaactttccccatgtagaaaattatgagagttcactcggtataagtccataccgtcaagatcaggtctgtcatactctatctagccttacacaaagtaggtttctgtggtctttgataggagagtatctatgcttgctgtgacttcatctgacatggtttctttcatacttttaatatttgctctttcagatcttggcacttgtagctgtcagaaaaggcatggactacctcttctcccagcacgacctcagcttcctggatgatgtcattccagaaaaggacaagaaaaagaaggaggatgagaagaaaaagaaaaagaagaagggaagtctggacagtgacaatgatgatgtaaggaactttccaaattccaaaggaaagctagttaaagaaacaaatgtgaaaattgtccctttttatacctgatgtgaaatggagggctgagttctaagaatgtttatctggacatgtggtgtattactcatttcacctccctttgccctttatattctctggttttttatgttttctgaattctttctgtaaccattaatacactaataatgacataatgactaataatgacttctaaaaaatttaaaaacccaccacattaaaaaaattctgatctcatagatataaaggaagtttgcttagtaatgctataaaatgtatttggtttctattaataacccagggcttatatttgagataataactcaattttatgtaattttaagcctaatgtggatagatgtcaatgatctcacttcacgtgatctgtgaatctatttgagtaggctctccaccaaagttctatgctgttatattaatattagcattatatttatactgatatgattcagcattatttttctgtagttcttcaataaaaagaaaagggaatgggagtttggggtctttttacataattatagtggttagtgtcatagtccagagggtcctcctccaattaggtgattaagttgagaagtaaaattgttgcccagttttttctttaggagaccagctcacagaaatacagattctccagcagggatctgtaatcagtactaggaggaaaactgggatttgtttactttaacacatgcggacaccttattccagtagccttttgaaaagattgccaaaataatgttttccatttgaaaatttgctctggattttacacagtgcagtatcacaaatgattttttgtgcctcattacccattctaaagtaggaatattgttaattgttagtttctacttagtacttgataactttgattgatcattgcatactttatccttaattgtctcaatagcttgttatcacattatttatttttgttcccattttacagatgaggagatttagactgagaaatgttaaatatgttttagaaattttaaagctttattgaggtacgattgacaaataaaattgtatatatgtaaggtgatgctttgacatatataagtcatttttctaattgtacacagccatagtggcaaggccaaaactcaaatccaggcctctctggttatttctaactggtcaggctatctgattgtattctttttgtagaacttggaaatagtacagtgaaagaaggcaagagacagaattggatttcacataaattgattcaataagaaaaaggcttaatgcatgaggcacatttagctaaagagaaaaagaggtgaaaagagctttatgtctgtcatcatccatctgcaatgagaacaggtatatagattttgtttccaatgatgacagaaaaagaatgtgtttaaactacagaagagactaagacgtaatagtccgaagaacgatgtgtttacacatttaatagaaattaaaatttgaaatgaatttctggaccactcaagaccaaaaaaataaaaggctgcctgaaatattaaaataattaaagcagtattttgtccaaaataaatatgtcaacttatgtacctggacatcaaatttaaagttcattacacattatgagtgtgtgaagtcggggattatggaatccccctctgtaatgatttttgagaaaaaatagtaaaatatcagctttggagaatgttttaaatgtactgctctctagtgacaaaagttggatcaaaagaactccttagaagttcttccaattcttagatatgatttccaacaaatcctatttcatttaaagtgtttttttgtattaatatttaccatgttcaactctgtgtttccaacagatttcttgaagccaaagtgtcgtacttgttttttacctcttcctcttcatcctaccctttccaaaacaaacaaacaaataaacatatacattggttcctaggcagtgaatccagctaggcaatttagagtacgtctgtgcagtatgttctgtgtgttgaactcattatttaggggctccacattacaaatgtggttctcctaagtttactttttagtcatagggtttggggcccatggatatagggagtcatgcggggacatgagggttacagctataatataatatttatgagcacaattagtgaaaattatagctcttcttgttacattgatccctttaccattatgtaatgcccttctttgtcttttttgatctttgttggtttaaaatttgttttatcagagagtaggattgcaaccactgcttttttttttctttccatttgcttggtaaatatttctccatccctttattttgagcctatgtgtgtctttgcatgtgagatgggtctcctgaatacagcacaccgatgggtcttgattctatccaatttgccagtctgtgtcttttaattggggcatttagcccctttacatttaagattaatattgtttatgtgtggcatctttatttttttttcttttttgctcgttgaatgcattatcttagttctctaaaaggatactgttgttcattaacctctttagagtcataaataaaggaattttccatgtaggtaataggctttatgttaagattttattaacattaattctcattttattttcaactaaaaaccatctttttggtacttttaattaagagatatattgggtctttcagcccaaacatagacttggaatcaatataatgcatttaaaaaaaacaaagtggtaatctttgggaaatctattataatttgggctaggtggcttgttctttaagcagtcccatgattagctgcctggttttgtcatttccattatgattctctgcttatctgaccatcatagacacctttttaaacattttattttcttatgttttgcttacattttcagatatctttggcacaagctaattgaaatgaacctttatccataaaatagtacttaaagtaagagaggaaagtttattttctagtgtacatagaaggcttcttgatagtggatatataaaaagtctgtcacttgttctagaaggaaagatcggtcatgattttatctagagacggaatcagcataaacaaaacaagaatttcaagaccgtattataacctgggaagtttcctatgtttaatctgtttttgcattgagatcatttgcttcacacatacaactcataaacattgctgattgggagtctgatagaaagctttacaattcagttgtagatcgatctctattttgtgcagttatagttttaattgactcaataccattaacttagaagagtggaaaacaaatgtgagggggaaagaaggaatgcagttaaaagatggcaaactggaagtaattataaggcttttctccttagtagtatgtaaatgattatagaaaacggtttgatcgatgctaggagataggaagggctgtataataaaaacattctaaaacctcttgtacatttttttcacagtctgactgcccatactcagaaaaagttccaagtattaaaattccaatggacatcatggaacagcaacctttcctaagcgatagcaaaccttctgacagtgagtagaactaacctcttgcatgcttgcttgaatatgatttgcacttacagagaaaacactttagaatggccatctgcattaactttccctcaattttgtttttcctttttctatgagaagatttacacttaattataataaaactttgtttttacataccctaagcttcattcttccttttatccataaacttttaaatttttatttggtagtcttttctcttacccaaatcatccccagtttttccaatggctaaattaataaccatgtttttaattgatttttctttttttttctgttggtattgagaattgcagcttataatactacatcactgtcactgtttgtcttccttaggttttaactagtgatcaaatcagctcaaaagagaaattgcatcattggtctctcagtgatcaataaatcaattgttaatattgagaatttggaaaaatttaattttgattaaattagcaatcatgaagtattagtacaactttctagatataacttatatgcatttgctttctaatctcttcattctcccttttgctatttcaaaattattattataactgcactgatctttctagggtgatagcctggtgactacggtgcaatggtttgtgacatttttctcttctgtaattgaattaacaggccacttagtaatattagtgaccatttcagactttcccaatagcaggtagcaattgccatcaagctactttctactttgcgttctcattgaagaaaatgcatccttttagattcagatgcacttcagagtacactgatctgttacagaaaaagacagttaagacacttttatttctattttaccatgccacctcaactacaataagaggttactgctatcaagaaaagtttggaatgaatatctattgataaaaaataatgggtatattagttatcaatcattgagtaacaaattacaataaaactcagcagcttaaaagaacaaacatgttttcttacacaattcctcacattcaggaatgcaggggcagctgattttggttctggctcagagtctctcatgagattgccgtcagagctgtcaagctgtcagctggggctgagtctctgaagactattttttttttttccaggaagaaatgaaaggatgatttgaaaattatagtatactccacagtgtgggagtgggcccaagaatagggactcaagggccccattacaaaatttttgggagtttaaataccctctacttggggtacgccctatgtaaatggagaggatgaagtaaagttacaaactcatttatttggcccacgccccatggagaggatatttcctgtcatagccgaagtgtgaattggccttatgttccctgcctccagacactgttttcctgccacatctcctcactgagagatgtgatctccatacatcttcatgggaggcagagggaccgatggtcttttttctgtaactgcttcatgctggcttggggcatactcctacctattggggatccctgaactctcaccctgctctgtctagtggaggcagggtagcttcttgatggccagggtgttgtcttcacctggaactggctggaacctttgttgtgtgatcatctgaagctgatggtctctaggcaagaggaaatgaatttggttaaaaaggggaaatttttttaaacaaaagtctgggaagccattgttttgaactaagctcatgcactgggccccaacagaccaaaccaaagcaaaatgaagtcatttgtgctaagactgtaaggaaacacgtgaattctagaacagagcaggttttgtttcttcttctgcaaatctctgtaacaaacattcttgacagcataggtatccaccccctgaggttcccattaaatattttagtgtctgaagctgggtgtctgcttccaaaagcatactcatggggcccttgggatgacctttgttttttacctgtgggtatctccgtagggctccccatgatatggcctccctcagagccagtgataaaagagaaagaaaccaagacagaagctgcagtcttttataactaaatctcagaagtaacggaccattacttctgtcatattctggtggttatgcagccccacactgttaacactgggaaggaattacacaaagtcataaataccaggagacaggatcactgagagccatcttggaggctggctaccagcctggatttgaagaacaaagaactaaagcagtcttacctttggtgtccagtttgtaacctataacttgtaaccgaggctaatttctgctaacccctattaatggggtttggttatgaatttctttttgagtttaaactcctcaaaccatgttctgacttcatttttctccatggagcattaatagcaaaagcacagtctaacagacatgtgcctagcatgtatgtcttctgttggcatcataacctggtatagccccttataaagaaatgtaaaagctattttttaaaaaaattactagccagaatttgaggctcatggaaaaagtttatgtgccatttgcccttcatcctctcaaaaccccttttaaaggataaattgcaagttgatatgatattagaagtttacttaaacaaaatacacttgagcattttgcctgaaatgtttcctaatgtcatgtttatctttataatccatgatgaaagaacaaaactgatagaagtagtgttgcagtatgagtaagtgcctcaaaaaaaaaaatctttttttccttatgaacaacagcaggcaaacctaggaatactgaagatggaaggaaatccaaaagcaagccttaggcattaagagaatgctatcaccctctaaaaatgatttgcttcttatccttctcactgacaagacaacagtgatccatcccagaaaacctaaagtaaaagagatgaagtgattttgtcttcatcacactagagtcttagcttaataccttgtttattgaaatgcctaaacttgtcttttttactcttaccagttatggaagatgcatcaattttgtgaagatttttgttttatacttcaccaaagatctaccatttatgtttttaaaaaattttattttccaggagaaagatcaccaacattccttgaacgccacacatcatgctgataaaattcctttccttcagtcactcggtatgccaaggtaaaggagagcccagtattttatgtttttctgtgggataattgccccacagaaatgtagttaatggtgggttattgacagaacttcttgttctccttcgtctctattatttatcttaaataaattacccagtgaccaaaacttgttccagcttttactagtagaaagcattctaagagacctagttactattacaaataatggaatctttcagtatcattaagttacaacccaggatcaacattagctcttttaatttcagtatcgtccctgatttaaagaggtaactggcactttctgacagttcttctccagtggtttctttccctcttaatgaagttctagggatttcagattctacttgattttctgaaatctctgaatgtttttattatgtcagtctttttgtcctttaatttctgacagcattacccacctggtagtacctcttttccttttgtgtttgttgtttttattaatttaatctaggtatgagatcttatgaatttttttacttgaatttcttgactctgctggtaaccttcatcccatttaaaatgtttgtttttaatacacaaagagaatataaatattaaaagagaacaaagaaggacacatttgacttctatacaatgcataaacatttgacagatgatgaaggaaatctgatttacttactacttttttttttcctttttctctagtcctcctagaactccagtaaaagttgtgcctcaaattagaatagaacttgaacctgaagacaatgattatttctggaggagcaagggaacagaaactacattgtaacctgtttgtctttcttaaaactgacatttgttgttaatgtcatttgtttttgtttggctgtttgtttattttttaacttttatttcgtctcagtttttggtcacaggccaaataatacagcgctctctctgcttctctcttgcatagacacaatcaagacaatagtgcaccgttccttaaaaacagcatctgaggaatcccccttttgttcttaaactttcagatgtgtcctttgataaccaaattctgtcactcaagacacagacacgcacagaccctgtcctttgcctctattaagcagaggatggaagtattaaggattttgtaacaccttttatgaaaatgttgaaggaacttaaaactttagctttggagctgtgcttactggcttgtctttgtctggtagaacaaaccttgacctccagacagagtcccttctcacttatagagctctccaggactggaaaaagtgctgctattttaacttgctcttgcttgtaaatcctaatcttagagttatcaaaagaagaaaaaactgaaggtactttactccctatagagaaaccattgccatcattgtagcaagtgctggaatgtcccttttttcctatgcaactttttttaaccctttaatgaacttatctgttgagtacattgaagaatatttttcttcctagattttgttgtttaaattatggggcctaacctgccacttattttttgtcaatttttaaaacttttttttaattactgtaaagaaaatgaattttttcctgcagcaggaaacatagttttgagtagttctacctcttatttgtagctgccaggctttctgtaaaaattgtattgtatataatgtgatttttacacatacatacacacacaaatacacaatctctagggtaagccagaaggcaagatcagattaaaaacaccatgtttctaagcatccatttttccctttctttaaaagaaacttaactgttctatgaaggagattgagggagaagagacaaactcctatgtcatgagaataaccgatgttctgataatagtagcatctaggtacagatgctggttgtattaccacgtcaatgtcctatgcagtattgttagacattttctcattttgaaatatttgtgtgtttgtgtatgtgctctgtgccatggctggtgtatatatgtgcaatgttagaaggcaaaagagtgatggtaggcagagggcaaagtcattgaatctcttatgccagttttcataaaacccaaaccacatatgaaaaaatccattaagggtccaagaagtctgtccatatgaaaatgagggtaaatatagtttatttcccaggtatcagtcattataattgatataatagctctaacatgcaatataaaattcataggagtattaatagcccatttacacatctataaaatgtaatgggattgcagagctgcagagtacagtgtaacagtactctcatgcaatttttttcaggatgcaaaggcaattattctttgtaagcgggacatttagaatatatttgtgtacatattatatgtatgtatatttcaaagtaccacactgaaaattagacatttattaaccaaatttaacgtggtatttaaaggtaatatttttaatatgatacattacatattgtgaatgtatactaaaaaaacattttaaatgttaaaattataatttcagattcatataaccacaactgtgatatatcctaactataaccagttgttgaggggtatactagaagcagaatgaaaccacattttttggtttgataatatgcacttattgactcccactcattgttatgttaattaagttattattctgtctccttgtaattttgattacaaaaattttattatcctgagttagctgttacttttacagtacctgatactcctaaaacttttaacttatacaaattagtcaataatgaccccaattttttcattaaaataatagtggtgaattatatgttattgtgttaaaacctcacttgccaaattctggcttcacatttgtatttagggctatccttaaaatgatgagtctatattatctagctttctattaccctaatataaactggtataagaagactttccttttttctttatgcatggaagcatcaataaattgtttaaaaaccatgtatagtaaattcagcttaacccgtgatcttcttaagttaaaggtacttttgttttataaaagctctagataaaactttcttttctgatcatgaatcaagtatctgtggtttcatgcccctctctatacctttcaaagaactcctgaagcaacttaactcatcatttcagcctctgagtagaggtaaaacctatgtgtacttctgtttatgatccatattgatatttatgacatgaacacagaatagtaccttacatttgctaaacagacagttaatatcaaatcctttcaatattctgggaacccagggaagtttttaaaaatgtcattactttcaaaggaacagaagtagttaaccaaactaacaagcaaaacctgaggtttacctagtgacaccaaattatcggtattttaactgaatttacccattgactaagaatgaaccagatttggtggtggttttgtttctatgcaaactggacacaaattacaacagtaaatttttttataagtgcttctcccttctccatgatgtgacttccggagataaaggattcaaaagataaagacaaagtacgctcagagttgttaaccagaaagtcctggctgtggttgcagaaacactgttggaagaaaagagatgactaagtcaagtgtctgccttatcaaaagagcaaaaatgcctctggttttgtgtttgggagaaaagtatcttggacgcactgttttccttgataaaagtcatcttctctactgtgtgaaatgaatacttggaattctaattgttttgtgtgccaggggcagtaatgtccctgcctcttctcccaatcaaggttgaggagtggggctggggagaggacttaactgacttaagaagtaggaaaacaaaaacctctctcctcagccttccacctccaagagaggaggaaaaacagttgtctgctgtctgtaattcagtttgcgtgtattttatgctcatgcaccaacccatacagagtaaatcttttatcaactgtatactggtgtttaatagagaatgattgtcttccgagttttttggttccttttttaactgtgttaaagtacttgaaatgtattgactgctgactatattttaaaaacaaaatgaaataatttgagttgtattacagaggttgacattgttcagggatgggacaaagccttcttcaatccttttcatactacttaatgattttggtgcaggaacctgagattttctgatttatatttcatgatatttcacatttgctcttcacagcatgagcatgaagcccagtggcaccaaatggctgggtacaatcaagtgatattttgtagcacctcactatctgaaaggccatgagttttcagatgatttcattgagcttcattgcagcctgaaattttaaaaaagttgtgtaatacgccaaccagtcaagttgtgttttggccagagatttagatatgtccaatttcctggctcatttcattgtgctctatgggtacgtataaaaagcaagaattctgtttcctaggcaaacattgcaactcagggctaaagtcatccagtgaaacttttagagccagaagtaactttgtcccagtcctacaatgtgaaaagagtgaatagttgcctctttttagccattttcatggctggtacatattcgtacgcattacttttcagaatcaatacgcactttcagatattcttatttttattctcttaagtctttattaactttggagagagaaatgatgcatctttttattttaaatgaagtagatcaacatggtggaacaaaatgataaagaacagaaaacatttcaatatattactaataactttttccaatataaatcctaaaattcctataacatagtattttacagttttatgaagctttctattgtgacttttatggaattaagagatgaagaagatgagatattttagcatttatatttttcaaaattatatgtatacttaaaaataaagtaactttatgcattta

SEQ ID NO: 64 - DNA, 1968 bp, Homo sapiens
agagaggttgagaacaacccagaaaccttcacctctcatgctgaagctcacacccttgccctccaagatgaaggtttctgcagcgcttctgtgcctgctgctcatggcagccactttcagccctcagggacttgctcagccaggtaagacctctccctttttaaggggagaccaaaagaggaattaagaagagccattatgtcacagctcattaggaacaaaaccagaactaaaggctcaggtcactgaggctggttcccttgatctttcctgaccccagttttgggaggagacagtggagccgctacagcaacaaccctcccattgtttggggaaataatccagaacgaagaactgtttctcactgtgggtgtaaaggacatttcaggccgtagtggagagggagaaactattgcctgaagcttcaaattttggttatggttcagtgtaccttccagaacagtggctgtgtaaagaggatgaggacccagaggaatctcagcgtatggcataggctaactctaaagcccatgaggatgaaagactgggaagcaaggtattggaacttatgttcccagtgtcagaagttttgggttagtagacaaggactagcttgttactcaaaatgtttccaaacccagtcaacaatgacgggccgcagagttcaatagaggaaagagactcacaggcaacattttatctctgggatctggactaagacactgaacttgggatggtgacttcttggtcttctccttccttctcttcttttccttacaaatgcacacttacggtgggtcctaaatgtctcattctttgcaaaatttctttcagattcagtttccattccaatcacctgctgctttaacgtgatcaataggaaaattcctatccagaggctggagagctacacaagaatcaccaacatccaatgtcccaaggaagctgtgatgtgagtggacagtgcctggcacccccattcaaaagttctgatggacaacatagagaagtcaagattcatgtccatatgagtcggatgcatataacttctatccaaagggcccctctaccccatagagaaactcagtccatgagaaggagtccataactgctctaggattcccttctaggggcttggtgaaactaacccaatatctgtagccaggaccctggagggtttcacctggacagcaagagcagagcttccttctggagcttcttcctcccactcttcccctccctcctctcccgggtccgggtccttcacctaaggaccaagggctgatcagttctagggaccaatggcccacagtcctgtgcaggatcttcaaagtcttccatctaattgtgccctctctcccccacagcttcaagaccaaacggggcaaggaggtctgtgctgaccccaaggagagatgggtcagggattccatgaagcatctggaccaaatatttcaaaatctgaagccatgagccttcatacatggactgagagtcagagcttgaagaaaagcttatttattttccccaacctcccccaggtgcagtgtgacattattttattataacatccacaaagagattatttttaaataatttaaagcataatatttcttaaaaagtatttaattatatttaagttgttgatgttttaactctatctgtcatacatcctagtgaatgtaaaatgcaaaatcctggtgatgtgttttttgtttttgttttcctgtgagctcaactaagttcacggcaaaatgtcattgttctccctcctacctgtctgtagtgttgtggggtcctcccatggatcatcaaggtgaaacactttggtattctttggcaatcagtgctcctgtaagtcaaatgtgtgctttgtactgctgttgttgaaattgatgttactgtatataactatggaattttgaaaaaaaatttcaaaaagaaaaaaatatatataatttaaaacta

SEQ ID NO: 65 - DNA, 2025 bp, Homo sapiens
gagtctacaagggaaggggagccggcaacacgctcgagcggaaccctgcggagctgcaaccccgggaggagtcgccggacagactcagacgcggtcccctgggacccagggatgcaccgcgcccctcccgccccagcctgcagagactggatgcttccctccccacctggcgggaagcagaggccctcgggcccgaccgagttcgggccaggacccgccccgctttctgcgagcgaccgactgcggccgccacactcacctcgccgccaagcagcactcgggttctgactcggtctcgggttccggtggcggtggtggcggcggcggcggtggcggcggctcctccatggcggcggcaggcgtgacggcaaaggcgggaggagggaccagcgcggcagcggcttctctcatccgtgcacggagccccgcatggccgcggcgggcagtaagctgcagcctggcgcggggcaccggagccccgaagtgcgggagtgactcgactccgcctccgcctctaccccgccgcaggagccgtgcgcgccgcggccatcttggaaacggcgaccggccgagcgccggggctacggtgggcggcgagggacaagcctcccagatcggcggcggtggcggcggcggcggcgggcgccggaatgcgaccggacgggggcggagacggcggcagggaggggcggggagcgccgtcaagtgtcggcgcgattcggtcctggagccgggtctcgccagctcgcccggtgtcgccccggccggtggcagtgggggactgtggagcggagccgggctgtgcagcgggctgggagctcgaggcttcccaggcggtcgtcggtctgggagggacgctgggtagggccgatgagcggggcgggcgcgacgctatgagcccggccggagtcgccgcccagggacctgccacccggatcccaccttccaggaggacggacgtcacccagacgctcgcaactccggtctcttgacagcgcagccttccacaggctcgaatttttaagacttgacataaagtctccggaattccagattattaaagtgaccccctcatttcaacccggcaaaacttctcaccccagtgtcataagattcgatagcgatctcccagaaacttggactggaatgctcctacactgaggggatggggggaagaagaaatgctaaagattatttcagagttacagaaatcctgttgaaattccaatgcatcgtttactcttagcgctggggcttcacagtttttttttaagttggaaatatttacaaaatttcccatagggtgaaatccagagttaatccaaaaccagaatcttttaaaattaagtacattcaaatgtgcagatttcttaaacctcatttagttgagctttgataggtgaaacgcacgttttgaacaactctggtaacaaagaaaaacattaaattgattataggtatgttatatttaaagaccagttgtgaaattagctatattgtgctcaaagtatgttactgacatttctccgtcgttaaaaggaactgctccattctagttttttataatagtctgtattatgtatatagcctgatagtgctgaatttctgaattgaccttcatcttatttactcaataatattcatttgacaaatacttattaagtgcatatatgtgtcaggaactgtactagatgctgaggatatagcagtaagcgcaacagaccaagctaacagcttagtaaagggtgaggtaaaacaaaacaaaaaagtattcaaaaaaataaactaatttttatcttaatttaaaaaattacaaatttttaaaaatcacaaattggtatccatgtataattcatttccgtgcattttcttgtgtgaagaaagctcagtaaaagtatttcttaggtttctgtaattctagttctctactcgattttcttctgcaattttctgagccagaacccttcttagaaggcatattagagactttaaaagttaaataataaaataaatctcttctttaaa

SEQ ID NO: 66 - DNA, 2920 bp, Homo sapiens
tttgttccaaggagtacagatagccttttcaaaaggcgcagcttaccgcggtgcgcgcggattctggacttgggcgccaactcgtagtccacgctccccggggtcagcagaggggcgctcacgctctcgccacccacctcgctttctcaccccgcgcttcccggcctgggtttttagtcttccttggagcgctctctggcctccgcctccgccagggagcggaaggcggagacagcgagactggccaggggggaggaaagaggacgcgtgtgggcaagggggacaacgggatgtccacgggctcggtgagtgatccggaggagatggagcttcgggggctgcagcgggagtacccggtccccgcctccaagaggccgcccctccgcggcgtagagcgcagctacgcctcgcccagtgacaactcgtcggcagaggaggaggaccccgacggcgaggaggagcgctgcgctctgggcacagccggcagcgcggaaggctgcaagaggaagcggccccgtgtggctgggggcggcggcgcaggtggtagcgcgggcggtggtggcaagaagcccctcccggccaagggctcagccgcagagtgcaagcagtcgcagcggaacgcggccaacgcccgtgagcgtgcccggatgcgcgtgctgagcaaagccttctccaggctcaagaccagcctgccctgggtgccccccgacactaagctctccaagctggacacgctccggctggcttccagttacatcgctcacctgcggcagctgttgcaggaggaccgctatgagaacggctacgtgcacccagtgaacctggtaggggcgcggcgcgcaaggattcgggagagcagccaggagatacccagggcgctcctgggcgccgggcagggtcagcccgttgggaagaattcgaaaggggtggaggttctgggactgggaacgagaaggccagtttagtttctcccaaatcaagggagtggccagccatttccctgaagaagaatcaaccctccgtgtctgtttgcatcgttctgaacattgtaccccagtgacagccattgactaatatcctacttccagggtaaatcttggttccatctccatctgccaccaggttgcagactgacggcaaatctcccttgcccaacttaatccagctgagtcgggcaggtttgaatcggcaagccctttcttaaaggagggaaggccgagctctataaaagagcatttgcatttttagaaaaattgcttgtggaagatagtaacgtttccccagatgggatttatctggaaagtccctctctgatctgccagctctcccggcttgggaaaaatcctgtccaagcccagttcctacttggagcttggagtggatgactgtgtgtgtgtgtgtgtgtgtgtgtgtgtgtgcgtgtgtgtgtgtgtgtgttggggaagggaactaaacgacagaacctcaaagtcagatgagtttcaccaaattatcctgcgggcaaagtccaggaagaagcgtgaacggatatggcaagtctcggattatcaacctccagtaaaatgaaaatcttagttcagagagaggacatgcaaattcccagaatgctgataaaatcttagctactccaagtcaggaatatctggggttcgcgtaggagagctgtttcggtttgagacaatcgtttctctctaatatctcacgttctttttgatttacagacatggccattcgtggtctcgggaagaccggactctgacaccaaagaagtttccgcagccaacagactatgtggaaccaccgcttaaatcggactggaactcacttgatgggattattcgttaaatgcgagtgtttgggggccacggagagaagggagagctcgtgagatgggaagaagtttccgctggattctccttgacccttcccctttccctggaactgtgatcgtgacaggtggcgggtgtggctgtcactgcacagcgcccacggctacagctgcgccggatctgggcgaccacgttttgcctctccaaaaagagcttcctttcgtgacgagacgcggacgcaggtccaccctcgggccctagctctgtagactaactctcggctgctgccccagcccgcgccagacagcccacggatccgttctcagcggagccagattcatcgcacacgtgcgggacggttccacacagccccggcctttcgcggtgacacaatggttagggaacggttagaacgcgctctacatccgctttaaagacagaggtctagacgtgagatccgcgtcgggacagggttttaagtgacaaagaagggcgagtggcttctctgggccgggttcgtactccagcacagcgcccttctaacgggcgggaggaaggccgctgctcgcagggctaggtggagacacacttcccagatcaccgcaggcgggttttacccggagagctctgggccgttcggcctccctgccgggtggcttcttcaatcccgtctccttcccaagctcccggctttttctaatcaggcaggcgtctgtcaaccctctccacttctgggctgaagcctccccaagccccgctgcgccaacctgtgtggggtcttcttcgggcctccctctccgccccgctcctgctcctacctgcagcacccccagctccgactccagactctctgcatcaggtctccccactccacgctccgggcgccccaactccaacaccacgtcctgccgcgcaggttcttccccgcgcggaggagcgcgcagggtgggcggcttaccatagcaagtgatcctgcgatagggaacgcgcccttgccccgaggctgcactaccacaggaaataacatatgtaaataaatttatttttttatgaataataaaacgcgctgtaaaaaccgtgtgccccttgga

SEQ ID NO: 67 - DNA, 168859 bp, Homo sapiens
aggccagagatttattcgagcttcggcgggggagggagcgcagctgggccgcgtttaggctgcaccacccgcgtgtttcagccgctcgactccgctggacctgggacccccagacgtgggaggatggggtgggtgtgcctgcctgtgagtttgggggtgagtgtgagctgaagcgggtgctccggggagtgaggagggagcgccaggggctgctccagggaggcggagacggaggggcatcccgggtctccgcgcggtcgcctgcgcttcaccccgcacggggtgacctggggccacgcgggcttcaggggaaacaatagctactccttagatcctgggctcctgccaccggctgcccaagccttcccggacgagcggcggggcctcttttcttatttggctaatttatggcgagaggctggggggagggatggcagaggagggaccgcgactggagatgggggcggggggcggcggttaaaggagttgcccgaggcggcggcgcgggtgatgtcagctctcgacgaaaatagagagggatcgcctgcaaatccccagctccggcggggctaaaccttgcaatccctccctggccggcgccgagccagagcgcagcggcctccaccgcctccccaggcgcgcacacacccgcacacgcgcacgcacgctcaccgtcctctgccaccactctctgctcccgccactcgccgcgcccgcgagccccgcagcaaagcacaggtggcagcggctgcaggggcgcatcgccggcgtgcgccctcctgcagccctgggcgcatcgctctctcggggaagccaccctcggagcccccggagctccccgccaagcgccatccccgcgggcggaggggagcgcgggtcgcgcgccgtggagagccgggacgcggattagcgcccgcaggagcctcctgcgcccgttgaggcgctaaagggcttaccccggaggcgggtggaagggcgggcagaggctcctcttaaataccgctcccggccgcacttcgcgctcaccccggcgtccgctttctccctcgcccacagctgccggatagtgctgaagaggagggggcgttccccagaccatggcatctacggaagggtgaggggatttttatctgtacccgcgggaaagcggggtcacgcgcggggtggtggcgcccctatccgggatgcggatagagaggcggcggcggcgggcctcggaggtggtggcggagccgtagcttggctggggatgggatggtggggaggggattgattttctttcctggagattgctgcttaatcctttgaaaatgcgagaggtggagggttgttttattttgataaaaagggtaaggtgcgctgggggcctgagagtgtgaggaagaaatcctcttgaggttacttttgggatttcaaaacaataggggattgggcatagtgtgagcagacaccggggtagcagcgcctggagcgcggcgccccaggcccgaggcgggcttgcaggtggtgccggctcggaaggaatgagccaagacagggccctggggcggggcaaggaccagcgcgcgcggccttgaacgccaggtttgcagagtcgccatggagatgctgggcccgctccgatcggtccttgtccctggaaggcggaatctccctggctagctctaaggaagggtggaagagatttgggtgcttcccgggaggcgggaaaacgtgtggtttgggacaagggcaggagtcgccagactccagcgggcagggatagcattggcttccctattcagcccgaggatctggagtcgtgtcctgcctcccaagattccagctggcatggggaaagctccctcgcagtgataactaaagacaattgtctttagcaagagacagaaggggctgcagggggcaaaaggattctttgaatactcacacatcaaaggaaaggtccacagagtccttggaccagtatctcccagaaaactttttgggcttcgtagaacctgagtggcaatgaaaagactgggcagctcagccctttggttaattcccaaaattgcagttactcacttgcaagcgatcacaaaatccatgttatgtgaaaagcaaatatcaggggcttctctgggctcaagtggtggtgttggcattttccagtttctcctaagaaattttaccaactccgcaggcttgttttaggggaatggatctctaaacaggctgaagagctggtatccaaagccagatctctagactgcaatctccaatagaaggaaaatatttctagaactgtctctctgtccaggagaaggaattcattcattttctgtcccccagagtccttccaaaggcatctggcatcttgtcattgcatgaaattttgtctctccctttgccctattttgcagtttagacttttttgattattatttctccaaaaagatgtttcaggaagacacctgtgtacaaggagggtggtaccttgtgctaaaacagatctctagaaatagatactaggagcccatatggatcaagatcagtgtcttaccatgtttagttaaaaaggcttttatattagaaaagatatgaaagaatttctggttgccttcatggaccttctagacttatccttgcttgtaaaggctagggtggaaaacatctgtgaaaaagatggatgatattagtcttccaaatcctgcatccagctcactccctattttgatggccagatagagaaggagaggttacaacaacaaccccaaactaagtaagtttatttcacctttgtcctaaatgaaagctgtcaaatgatgtgacattcaatgtagagccaaagtgattttcggcattttagaaagattcccatccaattaatcccatctttctgcactgtttatggttaagaaaagattcatcagaggaacttatatttaagagaagaaagaattgaaaaaagttgaacggctgggaaacaaatataggatctatgacccattattatttaacagcagtaactgatgagcaggtgacattctcagaagccctggtctttcctttcttcttctcttcttttcttgcaggagcatttactgagcacttgttgagtggaactcacatgtgaggaactccgagttggggggatacagaaatagtctgggatttgccttttagaagtctagctccatccagtcaaggatttttattagtaaattgttcacgtggactcatgagatctcttgcaacttctaacatctttggttaatgtgccttgtaaagaaaaatttactaagactcctcaggctgtctcctttgttagcttttgccctctaacaatattgaaattgtttccttgaaacatacattactgagaaggaagcaaaaatagcaatatagttatatgctttcaatttatatattttcagttcaactttgtttgatccagaatgtttggggaataggataatatgggaaactgaccattctggttcacatttatttggtgatgtaattatcagccgcagaacatgttaattaccaatttctaaagaattattagaagcaataatgacatcttatgtttgtttaacacttcactttcaaagctcattcgtgtacctcatcacatttgattcttccagtaactctgtgaagtaggcagtccaacaaaaatagactttaaggataaaattatatatagggaataccatcttttcagaaagattccaagacttggcaaagctttggggttatcatctgaaaatgatgtgtgctgggcatggctggtgcagattactggctttctctcaaacttttggcatacctatcctgcaaattgccttttaggatattctctttgtaacctgtgcattgatctttgcctgtacagagcatatgccaccacagtctggttttttgagggctttgattatttggaattgagattattagcatccagtttctataaaaatcaatagtggactctttggtagttcccaggctctgagaggtattttcctgcaaagcaaggtctaatttaatagttgagcattcttttttctgagtcccctgtcatggctagaattacggagatggcttttaggtccctgacccaaattggaaagagattataagtagttggtggcagccaggctagtgtccattactgactgggtcacagtggagtgtccagatgctgaagaggcaggcattttagaaatatcttcttggaggtggggggtggctaggtcactctgtatgtcagagacccacggcaatctgtcttctgatcagctcccaggagccaagggtcaggggaaagccagccatgagggcttgggcttcagtttgacttaaagagcaagggaaacagaaaactgctgacagtggaaaaaccctggcaagggagaccccttgaatttattatttcaagcaaataaaagcaaaccataaccattgtcctcttgcttctccccttgggaatgaatttgaggtcagcaggaggaagaccctacagcgtggacttattggaaagtgagtgaaggatgtggggcttatggtctagaggggtttgcaggttgcatgcctcaggcttggctggaattttcatttctcattttcaataatatagaaatcagcctccttggggaaaatagatattagtagagctatgagaaaaccatttcatgtttactaagacagtcgcttgtgagtaattgaaagcttaattctcaggaaataatttctaaatccagatgaaacttgtgaggcagaaactccatgttattaaaaaccaaaagacaaatctgttcatcagtatcaatggccacttcttttcctcttccatgcaacacaattaggtgttttgtgtctcctttggctttggctttaaaggatgtgtcagacaaggaaaagtccttaagtgatgatgcttcagctgcaaaaaacgagcaatatatttaacagctaagtgtgagatttctgggtcagtgtgccataaatcctacagttccagaattgcaaagctttttcatgatttgaagctcaacacagagtgatttcaatgtaaatcctcccctccctgccctcctccatggctgtgtcacacaatgccctgatgtctggtttccccccttttaaaggcaaactgaattgtttctcatattgaatttttctcccattggactggcttgcctcttggcatgagctgaaactattcttcatttcagtcgcctgctacaattattttaatctactaaaacactgatagtattaaatcttctaggaatagtaggcagaagcattattctgaagataaaattttagttttgcttgcatttaaagaacttgtcttcgcagtctgaagaaacatctaacaaacaccagacactgccttgcttgcagcttttgatttcatgcccttaacagcttgttgggggccaggcaggatgcttcatagaaagggttttagaatccagattatggcaaatctctttatttaccacgatcatgagcttgctctctcctccctctgcccgcccctcaccccgcaactctccaagtgccaactccttggaacgaattaattaaaggaatgtttaaaaatatctctttgctccatcttcaagtgctccatcattgactggaggcagatgggccacatatttgtcggtagaatagaaaaggactagcatctcattataaatctgtctggttggctttaaatgatgtcagaaaagacaatgggcccgcagtattaaaggagaatgaaaggaagatctttaaaattttaaaaagaagacccattttcttagtgctctggtttttcttttaaaaagtattgtttctcaatggtgttgatatttatttatttttcattcatgtatttaatgtctcacttagataaacagatatgaccactgttggctgaactgctgtttggtgtttttggcaatctcgacagttgctttagaatatggactcactgagcaagaattgtcctttgaaaatggaatgaagggaatgaactcgatttgatggctagacttgatctgtgtcaatcctggtctctaggatagatgatggcaatgttaaagaccttgaatgatgtttggggtcaaggagggagatgctgtccccatgcccccctctattttagaggcttcacttaaatcactgagagtactttcttctcttacgtttggtcaggagggccatctgtcacttgctgtttgtaatctggcacaggactttctgtcatgtggttctgccatcccaagttcccagccactgtgctgtcaggatcacagagctggtgacgaagttggaagtgaatctgagacctgtctgcctcccgctttgcctttttcccagcactggacatgaggtactgggtgcctgtggactgtatgtggcccatgggtatattcttataggctcacagaggattttgaacatgttttaattgttcacctatacttacttttaccttaaaaaaaatcctgattctggcttctcttaaaaattgggagatctgatgacaaagaaccttcccttttatcttggtaccatttattgagtgattatatcccagttggctttaaacagtttaatgtgtatcaatttatttaatccccacaacaatatgatgcagcaggagtgactcttagcctcattttacaggtatagaaactgaggcacagaaagagtaggtgaattgcccaagattttacagccagtgagtggcaaagctaggctttcaaaccaagcatcctggctctgggatccatgcctgtagttactaggccatacctcttagtccagcagggcaggggttaactggggctgaggaatggccatctcctgagatagggcatatgcctttcaggttgggcacagtctgttctgagactacttttctcatgttacctgcctgaccccttacctttccaaggaagttattgagagattgaaagcgtgcgtaccattctcttggtatacaccattgcctagtggttttggatttgaagaattattcaaaatctcatttctatgtaaaaaaaaagatctttcaagctacctttccccccaccccccaaagcacttcttgttattttctttaactttggtctgggttgtacataatggagaggtcttttgtaattattggtttggtagtcaggaagccaatagcgttgtctggtctagaggcagtgctttgaaagagcccagggcatgaccacatgggtcccaacctttgggatattgaattgagccttgggtatgtgctttgtagtggcaaatgtagctgagcttatagcaggccctggaatttatgttttcttttgcagccttcaggtgtggctgtttagggttgcgacttaacttacgctctttactgaaacagcgactggtcttgtccctctaggagtggggctgatatttatttcatagcagatgcaaacagtgatgagctaaggatgccttttgaattgaggaagaaatctttcagaggcgtatttctgtgttttaaagagtgggacagtttgctcatcacccaacagatggcagtaaatgtcagcactttgtccacactggtggtctgactccctttggaagcccttcaatccttagggaatcccaattcccatggcatttcattctcttttgattataaaagctttctccaccaagtatagaatttggtaagagtgaggcaattgacatatatctacagtgttccatatcaccataaacaaatataaataggatcagccaagcttatgtggctatatatatatgacttcatttcatccttgaaaatcccctagggaatattatctcattttagagatgaaaaaactggaacttagagaagttttgattttatgctgttactgagtttttaggttttttttgtcatctaattgtactgtgttttgtattatccatattttgcaattaatccacatttccttaaaatttcatggatccttcctttgctttttatttttgttttgttttttttttttgctccagtaagtgtcttcaataatttcattcaaagaaagcaagataacctagtgtctctgaagaaaaaataatgtaagaatcttaaattcttaaagaatcttaaagaatttaagaggcaatgccttaagaaggacagcaactattacagaaagaagttattctttgagtggagatgtgccattcaaaagaaaatgtcaccataaaaaagtgagaataagtttagttaattgaaaatgattgtcaaacctatttgtagatgtcaaacaagataatttcaaatggaagaagtagtagtacatgaagggagataggtaaaagaaaacagagaaaagaagaaaatcattcttctctcttagatatcatggaaagctaactgctgcagattgtgtttaatctcaatctttacttaaaaggacagttgggctgggcatagtggtgtgcacctgtagtcctagctattcgggaggctgaggcgagaggatctcttgagcgtgggagttgggggctgcagtgagctagctataacaatgcctgtgaataaccactgcactccaacctgggcaacatagcaagatcctgtctctaaaaaaattaattaagaaagaacagttggaatctgatagatttcttaggaaagtggatggacatcaacatgaacaaaacccaattaaacaaacttgttcaagagtgaaatggatggttatcaaccaacaacacacatctcagacattctaaagtggctgatggtacctggggaattggttcagctatcattttttctatttatatgcaacatatggtctagaaaaggtgtgaagaataaatattgggctaatttctaagaatagattagagagtaatggaattatagactgaatctattttcccaggatttttctggaactcaatcccatcaatcagcagatatttataaaatcatcatagaatcttagcatttgaaggattattgatttttaggtcataattaattgctaacatttcaaatgtagaactcattatctattagtctgagagcattgaactttagattcttttcacaggtattgatacactggggttgaggtgtcattggttggtcccaggaagcagattctgagatggagacttgtgtgcatggaatttattgggaggagctttcagcgtaaatccttatgaaggaatgagggaagccagggtaggcagagggagaggttgaaacagtcgcaccaaagcctgcccacccacaaggagctctggaacagggatggcccttcagaatgatcctgaattgaggaaagagatttggcctttctactcctgcattaaccagccattgaatggggctgtgctggaacgggacatggccctcggtacagggcaaggcttggggttggggggaatatagttaagagctgtcacttatcaacatgcccagcagctgggcaaatgaatcattcagtcctgaatgtggggggaaagggatctgggtagcatgtcacagcatccaccactgtttccaaattcaaatgttagaaagataataaaataatgagtctggttgcttgtgatcagaatatccaggcgtccacaaagctatcatctgtaataaaatgctataccttgctggtcaagtgatacaaaatttcaggtagtcaggaggaataacattaagtgatctattgttcagcatggtgactatagttgacagcaattgactgtgtacttgaaaattgggagaacagtagattttaagtattctcaccaccaaaaaatgataagtatgtaaaataatggatacattaattagcttgatttattttattccacagtgtatgtgtatatcaaagcatcatgttgtataccacaaatacatactattttttttgttagaaataaataaggaactaaataaagctctatcttaaaaaataaaaacctcaaatattacaaaatggcatacagtaaaaaagtaaaagactatctccggccccaatcctgttctccagaaatagtcatttttttttgtctgccctttaagacagggaaagtggattctgatgggcaggctggggagaattcaaggtcatcatcttccttaggtttatttatttgtttatttatttatttgtttttgagacagagccttgctctgtcacttaggctggagtgcagtggcatgatctcggctcactgcagcttccacctcctgggttccagtgattctcctgcctcagcctcttgagtagctgggtttacaggtacgcaccacgatgcctggctaatttttgtatttttagtagagataggatttcaccatattggccaggctggtcttgaactcctgacctcaggtaatccatccgcctaggcctcccaaagtgctgagattataggcgtgaaccaccatgcctagccatcttcctcagctttagctgtgtctcacatagtcaccaagtacataagagagaagcccttctcttcattccagtccttccaagggtgccatgtccaatggaaagatggttatctgaaagtcctgctatagagagagaaattagttacattaatctaatttctatctagagtggtgagtataatggaaggggtcagaaggaataataaataaatatattgggaacaagagtatagctattattgacattttcagtgttgacagcagccattttcacactcctgcaagtgttatttcccatggagtccttacctggggaaaagtgaacaatgaattaggtaaatcctttctggaatatccactgcattgttctgttgattcaagaagtcaggtagtctgtcaacttcaagccaaaggtacgtatatgttgacatttctctgttctattccactggcaaatattaagatatgttcagaggtgaaagaacacttttgtacacacaacccaaggtcttgcaaattatatcttcgtgagtgttttcccttattttcttgcatcagttgactctgctttctgagaccaagacattgattatcattgtgtttgtgtttttatcagcacaacaaattaattccagtgactcaattgtagagcaacagaaggtagagcaagccaaccaaatctcattggaaattgccttgcttttctttccttacctgtttttaatagttacaaatctgttatttaccatggcagatcgatattatgcatatttccagtttatgggtaaagatgtcactgattacattcaatctacatttaggaaatacatttttgcacatagaatgtaacagccaaataaaagagtgtgaatgattcactattcactgtcagataaattatttttaacaaaaacttttacccttttgtcctctggaccagtggctccttccccatcacacaaaaacatggctttattaacaataaaagcaaaacccttaaatatacccggcatacctgaaactgggaataaaaagaggtttaattggacttacagttccacatggctgaggaggcctccgattcatggcgagaggtgaaaggcatttcttacatggcggcagcaagagaaaaatgatgaagaagcaaaagtggaaacccctgataaacccatcagatcttgtgagacttattcactaccacgagaataccatgggaaagactggccccatgattcaattacctccctctgggtccctcccacagcacatgggaattctgggagatacaattcaagttgagatttgggtggggacacagccaaaccatatcaagggggatgaggcactgagactagttagaagatggcagcaatagtttaggtgggagattatgacctgaattaaggtatagaaatgagcataggttaccagattccaaggatatttagaaggacttggtgaccaagtgcaagtaggtgtgagcaggtggaagggcttaaagccatctctcagccttctagattaagcaaatgggggcgaggtaagtgcagaaaaaggaattcaggagagaaattaaatttgaagaagacagtgaatttggttcagcatactggcttagcatttgtggcgagtggaatatcagtagagatgttcactgggcagttagagtcatgacaggccggggcctttatggagtgctatttgtattacagatgtaagggagctcacccgcacacagcatgaagctagagaaaagaactgggctaagagaagcatcctgggaagctctagtatctgaagatgggcagagggaggtgattcacggggtgcggggtgcagggtgctgagaagtaaggaagggagtcaagagtgagcaggtgacttgaagtggccgacagtgctgcatgctatggagaggtcaaatcgtggaaggactgaaaagtactcattggattagtcaatttcaaggccatcattggcctttgccagagctgggtcagcaaagtgatggcagctgttgccatgttggtgtgggttgagaatgggtggagagaaaatgaatgcaaattatttttttccataaatggtagtcaagaggtagatggtactaggaaagcagataaggcaagagcaggattatatgttgggttgttttagttttaggccaggtgtgctataagcctgttcatctgctaagggaagggcttgattaatgaagaggaggtcttgaattatccgtggaagatactgatgaaggaaagagttagaacctgaggctaattcattgctcactttgggggttcctgcaggaagagcagggtgcctctgtgagactgatcccacagtataggggagcactactcagaagggacagggaggaaatggctgcctgcctagatggtcaagtccacatgatcaaccctggtcatctgtagagtgacagatggggcagccagcttgtccttacttctatagcctcattagtcagcaagctagagttggatgtattttagtagtgcttgctgttttttttttttttaagatttaccttttaagtcctttctaagtctccctagttggaattcttctctttcttcccttaacccttcatcatttatgctcttgcatagtttgtgaaaattttattggacccagttttaatcccaatctcctcttgggctctgcattccctttaaatcacttcctggatatttgcatagcacatgtatcctgataactcccaaatgtatgtttctatttcaggccttttttctaggttctagattcatatatcctacaacctaactgatgtctccatttgtgcaatgcatagatgtctggaaattatcatagtacaatggaactcttgatttttttttccctacaaactcatctgtacccactcccaagtttccccatctcagtaaattctatctgtttagagattcaaagccagaaatgttggtattaaccctgccttttttttcttccttcagcctcaacctacaagcttactaatttctacctcagttcctcagatatcccatggtcttgcccacatttgcattctcttttccagaaccactttctaccctaccaccattccacagatgactggcaccctctgatcctggagcatgctttggtcctcagcttgaataatatttcccagagaggccttctcttcccattccacctaaaataggtctctctttcctagtcctacctcattccccttgtttgcttccttcactgcatcaattacaacttttacatattttatttatctgtctgtttgtatctacaaagtaagcactttgaagactagttcatcatcatgtcctcctagatcctaatgcagtgcactcagtaagcatttgttggctgaattctcatccttgtcagcctggagaaggagggaaggcttctcagaagaggtgatgtttgagttgtgcctcttccagggagtctgtccttattacactttgttcagacctctctcatagcaactcatcataacagagtgtgctaagtgttttcttgtctgtctgttcactatcctggtatctctctgaggatcagggttacattaatttctttgtgcctcatcttattatcattatcacgatgaatgttagtataattgaattgtctacctcgcaaaagagatatgcaagggcatagagacgacagaagggaacaggtgtgggaggcaacagatccaaggttgagaaaacatttccttttgcttgttgggtcatggtcatcttggtaaggttctggtggtcaattgaacatccccattcctgcctaccagtcaataattaccctttgctaggggttaatagggttcaaggaggttacaagaataatcagttgggaagcagctcatcttgtgaagccaaaaatgtatttgtcacagtcattcatgtccccatgcagctgtctgggaaaattacaaactcctgtatctgcagttcttttaaaatgcaatgaaatttcatcagaaaagaatctttgagcccatcctctgtctttcccaggatgcctgcctcctctcagaatcatgtctgtctattcctttccattgttctttgtaaaggaaaacaaggagaagctagaatgaatttgatattcagatacaaagaaggaatttcttaagtcaaagcagatttttcaattacattagttaaaaaaaaaaaaaaaatccagggcttgaaaactgatttagaaaaagaaaagttaccagaagcagacaacgttgttgttaaattgatcttttaactattaaagagacacttagtatgtttaatcagtctcaatagagttcccttactctggttttgtatgggtctagaaataataccttgtagttggtatgtgtgttttccagcaacctaaataaaaatgttagctattcttatatttcctgaaatggagttcttttctggagttttctggtgactggacatgttgggagatatttattgcatcctggtgggataagagaagaaaaaccatggctggcatcttctttcttgactctgcgagtcctcacagtgcgagtcctgtgattggatgaaagatcagtttataaaatccccttcctgagccttatgggaaagtcttcagctgaagctatcctcatcatccttatggaaaatgctagaatcctcctagattcagagccagggcactcaaactgctgtttttgaagtgaaagtagagtcaaagccgagatgctgggttttctcgtctgctctgacagggaagccattgttagttgcgagaaccaagcatatacagatttcatttttactttatttgctttctctctccctctgaagactgtcaatggggttcaaggcaagtaaactctagatctcaacacaaaattcacacgtgattgtccagtggtcagacagaccgggaacaatttgcccagcagggagcactgtggagccacacctctgaaccatggtgattttcctgctgctttgaaggaagagcgagagggcaaattacctctttcccaggccccgcaccagctgttgtcttggtttccaagaagggaagcccaaccactttgtttacattccaagtgacctggagtaacaaccggggaccagctctctggaggccaaggctacacctgggacaactggctgaggttgaaagtgagttgacagcagttgccattcaccagcgggtcctgggtcctcgtcctcatccttgtctttgtcctcttggcttcccctgggagtcatcagcggggttcgaacaagatttgctggttccggagcttgggtatgttcagcctggttttttctgggttattgaaaaatgttttaaggtgaatggggcaaccctgggttagaagggaggccttaaaagcaggaagcctagacactcaagggattgaaaaaacatttggaaagggttggaaaggccccaaaatcaacaacacaagaatggaggcatgaaaacaggtatttcttttcaaaatgacttaccagccacccccaaagtctagcttttaacccaatgggaagcaagcaacaaaattaaaataggtgtgaaaacgttgtgtttttggtaaagggcacactgccttaggaggcgcccgtggaggagcagagactgatccacgtgtccatatgtttgcttagagaggactttccctctttgcctttgagctaagctgctgagccaagccagcaagatgaagatgttcccttgcttttagggaacaggaaaatcaggattctgtccagctgtggctctagtttctggttagggggcattaaattaatccttgagtttctcatgtcataagatcacaggatatttgttgaataaataaatgcatgcagccgaagagctcactggatgagttctttacctcaagaatttctggtttctccttcaagacaatcttagattatttgggcataaacataggaaccctgggaagcaggacctgctttatggatatgcgacttaggcagtccacggtttaatgctctgctcttatcatcttgaaatgtttaatttgaacaaggggtctcaagatttcattttgcccaaattacgtgcagacccacacattatgtagccagtcctacagggcagccacacatgtgcaggcttgcatgaaatcctcttaccagtgacagtgaacatggtaaagatgacagatgaccttgagacaatctgccttctggcagtgcactagaatattctcataaggagatactttcataaaacagcttctgagccagtgttgcacagcagttaagaagacgtgttttatactcagaaagacctaggcaaaaattcctgttccaccactcagtagctgtgtgactttggggaagttaattagcctctctgagactcagattctttatcttttaaataaggacaatatcacccacctgatagggttttggaatggatgaaagcaggatgtgtgtgaagcgttcggcatagtgcctgggacctggaagatacctataatgttgattgtcattgttcttcttggaatagcagtactgtgttacttttagtctgttgagcttagatggggttatccatcagtctcttgactttgcaaattaggctgctaacacttggtgcatacccaaaggtatgtttgctaattcttttccatagagccacaggtgataagattagaaagtaggccctgggcttctttgatcatttgagtgctgtatttgctctagcgaagggttgtttgaagatttttctcttatgtgcttttaatccataactgtttttacttccaacacttctaactccaaatgcgtggtgtctttcccgacaccaggcaggtgtcctgcaagtcagttcagttctgatgctatccacctgggctatggctatcctacagattgagggctcagtcccatgaggttgccttcacttcaggtgtcagtcacaagtcccaggttgtctctggtacttctgactgacaggctgtaatttctaatttcagggggtttccacaacaccctcctcaagttcaataattccctagagcagcttacagaacacaaggaaacattttactgatatttaccagtttattataaaggatacaactcagaaacagccaagtgaaagagatgcatagggcaaggtatcagggaagggctcggagctttcatgcctctctgggtgggccaccctcccagcacctggatgtgttcaccaacctgaagtttttcagaccccattgttcagggatttttatggagggtacattattaggtatgattgattaaatcattgaccattggtgattaacacaatctccagcccctctcccctccctggaatttggtgggtggcactgaaagttctaatccttagtctttctggtgagcagtccccatcctgaagctatctaggggcccccagccactggtcatctcattcgcacaccaaagtcacccaaaggttttagctatgtgccagcaacttgggacaaagaccaaatatttattttttattgtatcacaaccctctaatatcaaagtctccccaagcaacgagtgcctgactttccactcattcattcattcattcattcacaaactttctaaaaatataactgattgtttcaggtgatgttgggtgggggcacaggaagtaaaagatatttcaagcctaggacaggcagccactaggcaggagcatcatagagggcccgagccttggaagtagggggtggactggatgactgttgtttcctttaacactgagggtctacccccaccaatatggcgctttaaggtttccaacactttaaagcatctggaaggccaagatgagtttgagaaacatgtgacagaatgttacaatcagcaggtgagtaggtacgtggataaagggaatccatgtggtgtagaaaaaaaatgctcatctctgaaataaaacattaaaaaaatagtatgcagctaggacgtgtaaaccaaaaataaaattctaagctccccaagcaacggagtggacccctcctctcacccaagggcattctaaagcaaacctgaaacgctggtttaggccatgatgaggatgggtggttgaacatttctcattataccctccttcctttggaattcaggtacagctgactagcattaacattaaaagagaccttaagactgacaaaaaagactctttgtagcaataagatatcaacatgacggataacaggccctgaaagaaatcaaagtgttttaccctcaaatatattttcaacatattttgaaatgccctgcaaaagctgtctcttgtggggaaaatctcccttctgtagaaaatcctgttccttttccaggtctttttttctgatccaggagagaactaagagtctgacacatttttaagtctgataagaaacacttacagtccattctctctgaagcctgctacctggagacttaatctgcataataaggaccttggtccccacaaccccttatcttaacccagacactcccttctattgattccaggtctttaaataaactttttcaaccaattaccaatcagaaaatccttgaacctacctatcacatagaagccccgcccacccacctccttgcttccagttgtcctgccttttggaaccaaaccgatgtgcatcttacatgtattgattgatgttttatgtctccccaaaatgtataaagtgtgtaaacaaacaaagccatagcccaacccccttgggcacatgttctcaggatctcctggggttatgtcacgggccatagtcactcgtatttggctcagaataaatcttttcaaatattttacagagtttgacacttttcaccagtaaacactaaaagacttctatttgattatttttcaggagaatcaagtagttagacttaaaaaaaagttatccctctagaaattttcatgggattgatttttcatggatatacctataatatatgtggctggagtaaaccatattaaggcagcattctgtaaggatggagagtttatccataacgaatttattcatcatagatgaaatctatactaattagacacaagcatgatcttcaaaaactccacaatacttatctcactaaccaggaataaatgcctttaacattggtatattttatttcagatgcatgtacacatgtcaatacattttttatagtgggagcataacctacagatttttgcaacctacaatttttacttagcaatgtgttgtgaatgtatgttaataagtgaatctataaacttgtttaacggctgtatatagttttcattttttggaggtaccatgacttttacaaactatctcctattgttggatatttagcttgtttctaatttttcactattataaacgttttgcatgtacacctatgctgacctgtctcactatttcttagggtaggttgctagaagggaaatcactgggtcaaatggcacacatactcattattttgacacatgctgccaattagccagtgtctgaaggggcaggagattctccaatgcagttgtctttttgagtcccccttaccgctatgtctcttacttgcagttgtgatatcaaatggctctggggttgactttgaattcctcattacatggcaaaatcttcagccaggtttaggctaaacaaaaatctttcttctgtatttggtgagctttttgttcctaggttggctgtttatagctccctaatctttgacatcccacatcaccctatgttgaaattgtcattttaaaaatgtaaactgtagcacattctctaatttctttctgtaattgtgcagagttcacattgtatttctaagaactttgctttcttctactgagtactttctctaaaatggtggctcccgactttattcagggctggtttcttctttttggccctgcagatggaaagagctgaatatcccctctattttgagtaggaatagatgattgaatactccgcatacaaatggaaaacgcatcatctatctgcaggcatcatgattaccaggtttgattctcatgttcgtaactatcttgtctcaagacccaccattgcctcctccttctcctagctctacctcctgctgtggctctccagattttgtatttacattctatgatggttcttcatttatataacaaagtgtgatggagaacaggaaatcttttagagaaatcaatcagggaaaatcatacaaaatggcttcattatctgggtaagtcaagctcaagctgtttataattagagtacttaactatgcttgctttagtgtcccatgagccttaggaggcagttgcaggaggctaagtgttggtgaagaccaactcttgacttccttagggataaagagggactaaattgggaggacagcagggtaggggcaagaggaagaggaaagaagagtaggaagtccatgtgaaaggcaaccgtgggtaggcttgctttttccagactggtaggaacagattccaaaccaaacatttttattttgtgagtaactggcaggctgatgcaaataaactctctcaaatgaagtgtctcctagaatccctaatgacccagccataggcagcttatgcagggtttagtgtattatccttccttcccattcaggaagctgctgaaacaccctctgcttattctcatgtatttcacagcaccagagctgagtaaatggagtggaggctaagcctcctcacattgcccctctgacgcagttgggcagcggtacgactttctattcctggataaactgtggaccccaaatatgtatttgagtagcctttacttaacacaatatgctgttgctgtaggctttgtatcctatgaatggaccatttcctagtagtgcttcaagtttgggctgtgtttccttgatcaaactcaggccatatatatttttttctttccaacttttattttaggtccaaggggtacatgtccaggtttgttacatggataaattgcatgtcacaggggtttggtatacaggttatttcatcatgcagttaataagcatagtacctgatacgtagttttgtgatattcaccctcctcccaccctccaccctcaagtagaccccagtgtctgttgttctcttctttgtgtccatatgtcctcaatgtttagctctctcttatgagtgagaacatgtggtgtttggttttcagttcctgcctaaagttgcttaggataatggcctccagatgtatccatgttgctgcaagggacatgatttcattcctttttatggctgcatggtattctgtggtgtatatgtaccacattttctttatccacttcaccattgatgggcatctaggtcaattccatgtcagatcatattttttttctatccccttcaaaagtgagaggggccagtgcatgtgaagtttggaaatgagagccaagtaggtttacatgtctcgtgaggcacaatatgattctctacttgtcatcactgtggatggactcaggatgttccagtccccttgttatcctgaggaccacagtcaaagcatgttgagaaacccaggttttagccctgcctgtgctgctggctgctggaccagcaatccttctgtcatatctcacaatatgctttgtgagttttaaagactgggagaaagaagaaaatggagttcactcatgtctttgtttgggttggtgtcacacaattccataaactgggtggcttaaaaataacagaagtttatttctcatagttgtggagcctgggaagtctaagatcggggtgctggcagatttggtgtctagtgagtgcccacttcctcatagatggtgccctctcactgtgtcctgacctggtggaaggggtgaggggtctctcttggggctcttttataagggctctaattccattcatgagggctccacctgcctgacctaatcacctcccaaaaactcacctccaaataccatcaccatgggggtgaggatttcaacataagaagtttggagggtaatgcctaggttttcttctagggtttttatggttttaggtctaacgtttaaatctttaatccatcttgaattgatttttgtataaggtgtaaggaagggatccagtttcagctttctacatatggctagccagttttcccagcaccatttattaaatagggaatcctttccccattgcttgtttttctcaggtttgtcaaagatcagatagttgtaggtatgcggcgttatttctgagggctctgttctgttccattgatctatatctctgttttggtaccagtaccatgctgttttggttactgtagccttgtagtatagtttgaagtcaggtagcgtgatgcctccggctttgttcttttggcttaggattgacttggcgatgtgggctgttttttggttccatatgaactttaaagtagttttttccaattctgtgaagaaagtcattggtagcttgatggggatggcattgaatctgtaaattaccttgggcagtatggccattttcacaatattgattcttcctacccatgagcatggaatgttcttccatttgtttgtatcctcttttatttctttgagcagtggtttgtagttctccttgaagaggtccttcacatcccttgtaagttggattcctaggtattttattctctttgaagcaattgtgaatgggagttcactcatgatttggctctctgtttgtgtgttgttggtgtataagaatgcttgtgatttttgcacattgattttgtatcctgagactttgctgaagttgcttatcagcttaaggagattttgggctgagacaatggggttttaccattcaggacataggcatgggcaaggacttcatgtccaaaacaccaaaagcaatggcaacaaaagaaaaaattgacaaatgggatctaattaaaataaagagcttctgcacagcaaaagaaactaccatcagagtgaacaggcaacctaaaaaatgggagaaaattttcccaacctactcatctgacaaagggctaatatccagaatctacaatgaactcaaacaaatttacaagaaaaaaacaaacaaccccatcaaaaagtgggcgaaggacatgaacagacacttctcaaaagaagacatttatgcagccaaaaaacacatgaaaaaatgctcatcatcactggccatcagagaaatgcaaatcaaaaccactatgagataccatctcacaccagttagaatggcaatcattaaaaagtcaggaaacaacaggtgctggagaggatgtggagaaacaggaacacttttacactgttggtgggactgtaaactagttcaaccattgtggaagtcagtgtggcgattcctcagggatctagaactagaaataccatttgacccagccatcccattactgggtatatacccaaatgactataaatcatgctgctataaagacacatgcacacgtatgtttattgcagcattattcacaatagcaaagacttggaaccaacccaaatgtccaacaatgatagactggattaagaaaatgtggcacatatacaacatggaatactatgcagccataaaaaatgatgagttcacgtcctttgtagggacatggatgaaattggaaatcatcattctcagtaatctatcgcaagaacaaaaaaccaaacaccgcatattctcactcataggtgggaattgaacaatgagatcacatggacacaggaaggggaatatcacactctggggactgttgtggggtggggggaggggggagggatagcattgggagatatacctaatgctagatgacgagttagtgggtgcagcgcaccagcacggcacatgtatacatatgtaactaacctgcacaatgtgcacatgtaccctaaaacttaaagtataattaaaaaaaaaaaaaaaagaagtttggagggacacaaacattcagtccgtagcagcccacctagcgtctaagactgtggctcaggtatattcggagctttgcttcttcccacccagtatggaagctttaggagacttgcctgctgcctgctttacctgtgtttgtcacctccccatgggcctctccttccgggtgctggctatgctggggtcttggggtctcttaccttcccttgactttgtgctgctcccttggacagtctttagtggaggggtgatgtgggaagagctacacttccctttgctctcctgtcccttaattccccagagcttcacacatacaatgactttatcaaagattaaaaagagagggagagagagaaccttaaaaatagctattctcagaagttaagagaaaaaaaaaaaacactcctaaacttttgacaggaagtcacctgagagattagctctgtgttggtgcatggcttgaggtctgtcctcctcagagtaagtgctcctctttcagtcctccacggggcaaactcccactcctgtccacagtggatccccactgccctccctactcagggagagcccattgttgttcattggggggtgttcctgaagtctgagttaatcactatggatagcatggccaggagcaccagtggggaagacgctctcctcgggggtctctgggatcctttgagcattgacccacgcttagcacacagggcatacagatctccgaggacacttgccttccagacctaccaaggagagaaatgcttttctagaaggcaacatacctgcagctgtattctctgtctgccacagaagaacagttgtctttattgtgccttgacctttcctcatctttcagctgccatgtcgtgcccaacggcttaacagtacaacagaaatgggactcagcacccagtactgtgcctctccaagcctccaggccatttggcactggccactcccactgactaggtcagacctacaggtttgcttacctggggttccatcccatccttaactggtgggatggtggccttgcagctgactaggagaaactgaaggtggtacaatggagtgaattctctaggaaacagaaggggtcagcctacttggcctgttttggctgggtcatttggtcgtttttctaaaggccaaagttcatgctcttttgaccaaagttagggatttttttttcatcaggggagttaaatgagctatttgcacttccatatttttgaaaagcggcctttcactccagcaggctcaggctgccaaattggtgtgtccccccatctgtggacaccaacatcacagccacccagagcaatggggcagatcccggtggtgactgagcagcaggttgaggctttggagacccgttttgatgtgtctttgatccctccacacgtggctgaaggcacgtgggagacagagtgtggacctcaggcctttgctgcaacatcatgagaaaaccaggactcccctgctgcctgtagctggtgggtgggtaggaggagtttacttaaaaaaaaagttagaccctagggttggggctggggtttgttcaagggctggggcaaaaggaggtgatagaaaggagggagcttgaaaattgccaagggaggaaggaagggctcagttgaacagatcagtctttttcctttaggaggggactggagaatgctccatcatggttacagaagagcttcaagggccgtgggaccttctttagccattctcaccagcagaaagccacagggaagaagaggaaaagggtgaaagaagcccagagtgataaaagggagtctctattctctcccattctttaaaaccagagcattttgagcaaaccaccattaagacacttgctttattgatttttataaatttttatttggctattttggggatggggggagacaaaaatcactgaaggaaatgttcaaagctgggaggaaaagtggttggtgacttttttcccacatttgtaaaacatcctttcacattttgtctgaatgcctattgcccgttgccaaatcctaattcaattaaaggtttagcaatgaacaccagtttagaattgttttgccatctctgctcaggacaataggcagtggaaagaagtgaagaggggggtgtcagatgccacacactgggggatatgggtgctatgggtcacctgcagccatctagctttaaaatgaccggggaagagcctcctgcattcactgtggggagaagtcaggagctgggctggcctgtgtcttcaaagtggcagctttagaaatcaggagagtctcctgggaccagctcaagctgcaataaaatgcggtgccattcatgcattaaacagatccttacagagaggctgctgctctgctaggcgttaaggacagccctctggaagacagatacagccacatctggcagctgcatggaggccagcagcccgagaccctgggtgatgatgcatcttgggcttctgccacctgctagcaccacactctgacccaaaccttcacatgggacacctggcaccaagaaggaggatagagatgtttgaatctaggaccagatacttactggattaatgacttggcctctcagagcttcaggttcctcatagactcccaccataaagtaggtatgatagcacctatcttggacggttgtaacgatagtcatctgtcatttgaccagtgctggaacatataggtatataggtgcttggaaaaaggtggctattttgaaatattctatgatttaagccctggtgtgcttaatacccccctgaaacacctaaagttgagacttcaagatgtataaaaccttccaaatagattcatgccacatttatccaccctccctctccaagcatacacatgcactgctgaatcttccagaaggggaggtcctaagggtgccaagcctgaacagatactgggaggaggactcggggcattccctccagacagttttcccaagaccctccactgccattgggaaaaagagtgtgggaaccccgggagtcttaatttaggcagccaaagggtgggccttgggagctccagctctctcagatttctggtctggcaagatggagtatgaataagaaactcagtaagcatttaactgctgattgactctgggaattcccaatagtattcgcaatagagaaggcaggtccccttcccccaaatgtcagaagccggcttcctccgcctactcctggtgacttccaccgccctggacacatgggggcgctgcagccctacttttgctggatgccctccccgtccgagtcctgaaagaccctgattttcctctgtatctgggtgagttcacattctctgtgtcttcctatgtagaaatcagcgaaagctcagcaatgtacttagaaaataaaaccaaaaatgtgcaccttaaaccaggaaacaaaaacttacgcaagcaatgcatttttttaattgtacaaacacttaaaagtatgtgtaagcaaaaagaattccaaataccctgtgagaataatattcaaaacacacacacacacgtgcacaaacacatggaatgggacgataagggtgatttttatttatttatcaagataaggtatcattctgcaaactattttgttattagctttttcacttaaaaatagccctgcttgcaagcaggctctgtggtgcaatggatagcgcattggacttctagcctaaatcaagagattcaaaaatagccctgctaaatatttgcaatctttcctacgctcctttttcccccaaagtgactttggatatccagagttaccaaatctagtatttgaagtccttaggtttgagggttgaaagtgaaaggcaagctgttttaatgaaaattcctaactgaagagagcggagacttaagatgcttaaattttggtcacacctgagcggtatttgtttgcatggcagttagaaggcaggtaatttgtcctaaaactaaaacagcagttaacaacctttaaattccctgaggagatcccttcttccccaaccaaacctgttcccatttccttctagactggttgacggtcaggtgggctgattggttctccctgctacagtggtagaattcagcgctgtacctaggtaagaagggttttggagggtgtatgggaaggtacacacagggtagagatgatagcacaggctttgtggtcagactggcaatggttcaaatcccagctctgtgacttcttgcccaggtgggtggcctcaggcaaattacttaatcgcccagagcctcattggtaaaacagggtcataaaactctcacagaattgtgactggcagattataagcacccaatgctcttttaggggttcacaaagtttttctgcaaagagccagatagtgcatattgtaggctttgtgagccatacagtctgtatcataatgagtcaactctgccattgcatcacaaaagcagccacggacagtatgtaaataagcgagcaaggctgtgttccaataaaagtttatttacaaaaatagatggcaagctggatttgacctgtggaccatggttgactgaccctgctcgtgatcatccccatccaacagaaatatagcagaggccacagatagaatactagattttcttgtagccacactataaaaggaaagagaaacaggtgaaattagttttaagaatagattttatgcccgggcgtggtggctcacacctgtaagctcagcaccatcggaggccgaggcgggcagatcacttgaggtcaggagttccagaccagcctggccaacatggagaaaccctttctctactaaaaatacaaaaattagctgggtgtgggggctgatgcctgtactcccagctactttggagactgaggcaggagaatcgcttgaaccagggaggcggaagttgcagtgagccaagattgtgccattgcactccagcctgggtgataagagtgaaactccatctcaagaaaaaaaaaaaaaaaaagaatagattttacttacctcaatatatccaagttatgattgcttcaacatgtaactaatatgaaaaattccttaatgagatggtacattttattttttggtaatattttcaaactctgctggtattttaaacttatgacacatctcattttgcactggtcacatttcgagtggtcagtaaaacgtaacctcaatattgcttctcaaactgcaggccaaaaccaatttagtgggtcaagaaagcaacttacttaaaaaaaatcaaattttaaaaatgaaatggaggagaatagaaactatcagggtacactacatgtaggaaggacatgggtcgtttcttgtactttggtgtgtgaatgcctgtgtgtgcacgtgcctgtgtgtgggtgtgcgctgagacatcatgagaaaaagaagacatctatttcttactgtagattgcacacagacatgtttgaaactcattactgtacgtgctaaagtcaagtgggttttttgtttgtgtttttgtcttttagagcaggctaactggggtgtttagctagtgcttcacacaggctgtgctgttgaccgaataaacatccaaaaccagctaaaccagttgctaaatgtcatagtgaccatttaaaaatacaaatcaaagtttcaaactttaaactttattatctctattcttagctttaaagcatgctcattttacagatagcaaacagaaatccggaaaagtgaaatacttaagaccccaaaaccttggctgggcccagtgtctcatgcttgtaatccaacactctgggaggctgaggtgggaggatcacttgaacccaggagtttgagaccagcctgggcaatatagcaagacctggtgtctacaagaaaatttaagaacaaaaaagaggctgggcatggtagctcatgcctgtaatctcagcactttgggaggctgagatgggtggatcacctgagttcaggagttcaagaccagcctggacaacatggtgaactctgtctctactaaaaatacaaaaattagccagacatagtggctcgtgcctgtaatcccagctactccggaggctgaggcaggagaatcgcttgaacccgggaggcagaggttgcagtgagccacgatcatgccattgcactccagccagggtgacaagagtgaagctctgtctcaccaaaagaaaaataataataagaagaagaagaaggagaaggagaagaagaagaaaatactaatagttaaaaacaaaacaaaaaaaagaccaaaaacctgagaagtagttttggaacgagaatgaggaactctgtgaactcagccttgagctccttcctcacctgctgggctctctacctgggcatgtgaatgggaaactgggccaattcacccagtgatttaagcattgagtcatttttttgcttggaatatttgaatatatgaaataaaagttaaagaggtattgctttaaagcacttcattctcttattgattcttttattgactcttccacaaatattttttttccctcagtttttggtcatctacatatttaggtttttaaaaaattaaattagttttgtactcaggggtacatgtgcatgtttgttacgtgggtatattgcatactggtggggactggacttctagtgtacccgttacccaaatagtgaacatcgcatcaaataggtaattattcaaccctcactcccagccccttttggagtccccggtgtttattatttcatctctatgtccacgtgtacccagtgattagctaccacttataagtgacaacatgtgatatttggttttgtgcttctgaattagttcatttagggtaattccacctgctcatgctttctgagcatccgaaggtgtatcctgctgggaaacaaatgtgaaggaggcataggctctacatgctcacaatctggggtagggtgttatctttcaataaaaacatgtctgagtggggcatggtggctcatgcctgtaatcccagcactttgggaggccgaggcgggaggatcacttgagtccaagagtttaagaccagcctgggcaacatagggagactttgtctctataaaaaatacaaaaatttaaacaggcatggaggcacacacctgtagtcccagctacttggagattggggcaggaggatggcttgagcctgggaggtcaaggttgcagtgagctgtgatcacaccactgtactccagtctgggcaacagagtgagaccctgtgtcaaaacaaaacaaaacaaaaacaaacatgtctgagattatttcgaatgctataaaaaagagtttgtttcatctggtatgtagtgccgtaaaagatgaaaatgtgaaactgatgaaactcacttttcctccctgctctttagcaatgggatgaaagacattttaaataaatctatgactcatcgggtctttctcttttcagtaaaaattatttaaggcctattttctggaaataaattctgggtaaaccctactcccctaatgggatcccatttcttcctttccccgagggttgatacgtagaatgaacacagtctttggattcaggcagacttgggtataaattctgcctctaccacttcaagactatgaggcttaggccatgttctctaagactcagcttccccatccataaaatgagtatgataacgctgacctcataaggttgtagtaacgattagttgcaagaatatatgttaattaagaaaaaagttcaagtgtgaaaaatgcttttatatatgaatttttggtatgaataagttttcatcacatagctaattgagtctagaaatgattttgtttgtttttgtttttttttgtcacttcctcctccttccagaaaggtgcagtgggaagctgagaaaggcattttggttcccttattttaaggtcctgatgcttaatggcttaccgactgcatttttaagatattgtttccctacccattcatatctctgtcttatacatgtatggtttctgtcagtaattcaacattcacaaaaaaatggcccagacattattttaaaaaagaacaaaaaacaaataggccttgcagttgttaccatggcaaccaaatactttcctgtcatttattcagaagtgaattattaatgagctttgtctgggacatagtcagaaaacacacccgttactctccaggggaaggtaatatggcttctgtagcaagcaaggtcacagtgtggaaaagtaggggatgttcttgcctcctcatccagtgtggggaagacccaaatgagccagccatttacatgggagcctcctcagtggccagagaccccacgtttctggcattttgggattgcataaaaagctgggcccctctctgagtcacttttctagaagcagcatcttgaactggcatttcttcccccacccaccccagaatgatttgacccatttcttcttaggtaattctctcccacacattaaggcagccatcttcagtgattgattgaccaggatcaagtacatataccaattctacaggagaatgggggtgaggggaggtgccagaagatgggaaagtcagaaggtctatttttgcagattactgggtgtggtggatacctgtaatcccagcactttgggaggctgaggcaagaggattgcttgattctagaagttcaagaccagcctgggcaacatagcaagactccatctctacaacaaataaaaaagggggaaaaaagatgtaaatttttgccccttgttcttttttaaaaatgaaaaagcactgcaggttagtcaccaagcttctcagacaaggtaattttaaggaatgtatttaagctttctaagtcccagtttccatgtttgtaaaatgggtttaatagtaggaccacattatttaggggtggttgtgaggataaatgcataggaactatatgaagaagttcctgacacacattaagccccttagtatgttagctattgcttttaaaatgatttatccctaaaccatatatcaatattgcttgaaggttgaatcacctgaaatttgttatgatttcaaaatacaaccttttaaactgatgggttttttgaattttcaaaaataaaaattgatgttcttttgatttctttcaaaagaagatgcttgaaatagccatctgagtagtaacatattgatgccttttcatcggcacctttcttcagttgattgttgatgtacactgacatccctgaatttcattacagcagtgactgagggtgtcaacgtctacaggtatctggaaaccatatttattttaaatgacatctttttttttctggcacaataaaagagtgaggaatgagagaagacaagataggcctaagaatttagatattccatggaaaaaacaaacctgagagtgtgaaagaaatatagcagggaacatggttaaggttcagagaaaagaaaactgtcattatttttattttattttattttatttattttatttttttgagatggagtcttgctctgtcgcccaggctggagtgcagtggcgccatctcggctcactgcaagctccgcctcccgggttcaccccattctcctgcctcagcctcctgagtagctgggactacaggcatccgccaccatgcccggctaattttttgtattttagtagagacggggtttcaccatgttagccaggatggtctagatctcctgacctcgtgatccacccgccttggcctcctaaagtgctgggattacaggcttgagccaccgcgccgggccaactgtcattatttttaaagcttcactgtgttccttgctcctgtgtcctttgtctaaattcttctaactttgatgagccaaattctacacatagtttcacccagagaacctgcaggctcaagaaaaaaatactattataataatatatgatgatataagattggttagaagatgctaaggagaatccaagcaatcagagaaaaataaaaccaagctccctgtctttgatatagcacatcttggggaaagatcaagtcagaaaagcagatggccggcctggctcattgtggaattggtattctgagataacttacaggtcccaaaccatgtcgctgtaaggtgttctgagaaagaacatttgactgctacccagacccctctgcaggttcttctgtttagggagaatgggaggcaaaacactacaaaacctgtaggctttagaaatagacagactagctgtgtgaccttggggaaattgcctaacttctctgagcctcagtttgctcacctggtaaaagggagataatatttccctttcagggttgtgatgaggatgaaatggaaaaaccatctgatatgtgcttgtcatagattatcaacagctgttacctctcttctatgtactgaaaaagccatctgttaccctaattcataaaaaggaggggagggcagggatggtttgagcttggacattttctggcctttctcaatgacaatttagaatgcagtgaggggaaagcttttatttttgaatatttctatttcactgtctcactgggtcactctggggcctctagaaattgtattctccagatatagtatgatgttgtcagcatatgcatacatttttatcacttctttagtttatctttgtataaaccacatatatctgggaaatttaaccaactgcctttctacaagtggtgtcatatttaggcagatggttactttttgggtacacaattgtgtagggaagccatcttgcactgagactctgagaccatgggcttcccagccttagcatcttacttactgtcacctctctaggctttagaggggttgattattgggtttctaaaatccttctaaatttcccaaattctatggttcaaagtctttgtgtaactgtccaatagaacaagcatataagtggccaaacttctgtgatgatactcctttcccctaaagccagtgaatcttctgaacattcagaaattgggatactggtgaatatgccacagtggaaatgcataggtaacttcaacaagcaaataatcttcaatgatgaatcaatatcttctaatccactgagcctaaagctgcaactgtttgagattcattaaggattcttaaatctaacatgtatttgtcattttgaattatggccatatgctttgcagatggcctctgagtgggtcttccttattcaagaaggagtagggtcacattcattatttgtacattacttttttaaagattcatgggattaaaggatgaaatcagaactcagacaatccaggagcaacctgcgtggatgagaatagtcatcttccatattccacatgggatctgtactttcagttaaaatatttatataattatggtatcattaaaaaagtcatttccagatctcactgacttcgttgatgaatcacccactcaccggtttaagttacatgtgacaagacagcttctattactattttgtttcttgttcttggattccatgagatatctatacttagcaatatgatactctcctcttttatttgcactagggtgaacgtatttctctttcaagcaaccaaaaaagtcctggctggaacagaggaggcgatggcaggccattgctaaactttgctgtgttgtggcagtacagtttctgtcccttttatcttgttaactgtcagtactccaaacaagcgagtagaacaattgccatccgttcagcatgaagaaccccatggaagggatctagagggagatgtcacaccatagatgtactgagtgagatggtatcatggtggccattcctcaaaatatcagcactgccctccagaatccacccagatgacattgatcaagcatctactgtaagccagacacttggagaggtgctgggaatacagagatgagaaagacagggtatttgctcttgggtggttcattccataatgatagcaacaacttatatagaacctgttctatgccaggcattgttttaaatgcttcatgtatgttagcttgtgtgatcttcagaacaaccccatgaggtgggaactattcttaccatccctgttttatagacagggaaactgaaacacagagaatctgggtaacttgccctagttacatagctagtgaggagcagaaccagaatccaaacctaagcagtcagctccagagttgggctccccactggcacattctgcttgtactctccttttctctgataatcccatgacatctttatctccttaagccatatagcattttcttaggcttatttctttcataataaccattataaaaataacaacaacaaaaaatactttcaaccaaaaaaggcagaaaaaaggcaacacaacataacaaaattaatttacccaggtcccattactgttgtcattttagtttatgtcctttaaatttgtgtcaaactaacatagtattttcaggcatgcttttttcttttaggattatgccagagtttccccactatattcttttttgacataacttttaatacactaccagtttgagtgttttccagtcatggctacactatacaattgacttaactgatcccttactcttggacatgcctaaaattcctctgtcataacactgttgtgaacatctttgcatatgtatttttttctatatgtctgataattttcttagatggtgtaggcttttaacttttggagcgtgcaggtaggaaaagcaggatcagttttcagattcagattcaaaagaaacatttaagcttttttcactcctagagagctggaaacaataataccttaaaggtctaaagcatgatctagatcattcacctaccctttaggaggacttttttttttttttgagactgagtctcgctctgttgcccaagctggagtgcagtggcgtgatcgcagctcactgcaacctctgcctcctgggttcaagtgattctcctgcctcagcctcccatgtagctggggctacaggcacctgccaccacgcccagctaatttttgtatttttagtagagacagggtttcaccatgttggccaggctgggcttgaactcctgagctcaagtgatccacccacctcggcctcccaaagtgctgggattataggcgtgagccaccgcacccagccttaggaggaatgttaaaacttatgctttgtccttttggaaatatcatgtatcttcttcctatgaaatggattcatgatgttccattataagttagctaaacaaagatttcactggtctagttgcccctgtggcccatcttgaagaatcactctatggaatgatgggcaatcaaacacaagaggatcaggaagaaacaaaataggtttaacagaatctctgtaatagtgaaaatatcgacaggttgacaaggaccacagggaaagcacagtatgaaacaaatggtaagtaaaggtccaacaagtggtgggtgattcagtgaagagacagcaatgcagagtggttaccacgggccttgtaggaacatggagctgagtttgatttcatttcttagtttctgtgtcatcttgcacaagttgttccatttttctaagcctcagtatcttcatctgtaaaatgggcatgttatcatacctgcttcataaggttgttgtgggaatctaaccaatcatgtaagtacagatacagttactgtttgttggctttgtgcagggtactgtatttttacaatttcatcatcattttcttcattgtcacttcactcagtggaaggggactatgtgataagagatcagtactcattgttgcagaacatgaaatcatcatagttgtgtgtttctgggaaagacaataaattaaaaggtgcaatatgacacttacaagaaatacgtactcccctttgttttcctgaagtacaaagtaggatcaggttggaatttcccgcctgtcttctgaggcaaacaagagcagtttgggggcctcgctgagggggctggtgtcctctgaaccagcagggtaggcatgagtggacaggctgtggcttgtacttcagtgtccctctgatgtttttaaaaattgacagctattgaagatttttcgggctgttcttggtgggactcaaactcaaagagaaagaaggggtgatctttatgggtaaggtaactgggatgtctagggattcagcaggctttggatacagcagacagagggctgaaaggctatctagactttgctactctccccatcttttggttgggttttcttctgggttgttgtcctttcaggcaatgatgggtttggcagctcaagacttacagcatcctcagagaaaatgatttcagcaatggaaagtgcctcttttctgatacttctaggaagaggcccagagaagagtctcattggctgggcttcagccacacccattcttgggctgaccactgtaggaaaggattgctctgattgcccagtctggatcaccgtgtgatgacaatcacacgatgggatgacatggaaaaggtggctgcccaaaaagctgcccgaatgatgaaaataagagaaaagaaacaaagggatgaaaggaggaaaatatatgtggctactgcaaactcttaaaaaaatctcataattgagtaacttatacctgagctctgtaatacttcactccaacttagtttgtcaaggagttttcttttcttttccttctcttttcttctacctccatccccactacgtgtaattttgtcagatgttgtcttctattgcctgaaactttagcagtcactgtgaatcctgtttctttaagcccagggtgtcattgggagcataacagtcatccagtgcagctcagcttctccctacagattctaaaaatacccagaggcactcaaaacaaacagcgaagcactgaggcactgcccgtgcagacacccacacactcccctctttaaactgccttagcgctgtcactatagggagaatcagcaactcacgcagcccttttatttatttattttgtttttatttatatacctctttatgcagaagagatgaggggttcctgatggaacagaattgattggaagaaagggaaagagggagacaaacagcaaaagtgtttgcactgtctttttgcagctcgctgtagacctgaactaagatgtatcgagagatcagaccaatccagggagtcgcacagattagctgggatttaaaataaaactctttaacaagagatcacctagaataactcgcacatatgcatccatgaagaggcccaaggaccacatttggagaaggttagtgctcacaatgaccagggctacaacctggcttatttttcagaagcaaagcaaaagccaaggccttttccatggaatctttaggtggagtcgaaccacccagagcatcagggtgttcttatgtcaaggaggtgtttcatttcacaggactgcagagctgagggtattggcattgcatgctgtgcatctacagtttgggaacttgcttaatgttgattgtcttatcaaaccagtgagctcttgggtttttcaaaagcaggctgagggattaaatgataaaatcagatggattatgaaaatatgagaatcatgggaattataacaggtatgaccttttatagattgcctgggacaatcaggtgtctgcttaacataatgaacctgacccggtatcagcgtgcaagtaaagtctttgcagtcggtggttaaatggagtttattaaatattgttagtgataatcatggaaaggagaatttaaaatggccatagcttctaaccaactctggggatgtctggatgacatttgttttggctgttgggattcgccacgtaagtaattgattgcccagaagttgttctcagatcaagctttcaattggccggtttatggcaggatcctgggatttaaattaaaaagtgaagccttaaggataagcataagtaagttcttgggacagaatgtgcttagcattgtttccatccataagtgagtggaggaagcctgcgtgccccggacatatgcttttcactgggaaaggcgatcaaatgtctctcttcctctctccctagactgattctcatggagagtccttggcatgttctcaagcctgaagcaaaggcttctaagctcccaaattgctaggtgatctctcccgaggaatatgtccgaggcacaggtgccatgttctttgtgggtgggagtttgcttacccaggattttatgtctggcttaaaaaaaagtctgtattgcctattgaaattgcattgtctaaatgtggcaaaggatttgcaatagttttgtgaatcagggcagtctaaaaattttattagtaataacagtagcagcagcaataacaaaggctggcatttacatagacttcctatgtgccgggcactgccctctgtgtcacaatttttctttttttttgagacagagttttgctcttgttgcccaggctagagtgcaatggcatgatctcgtctcactgcaacctccacctcccagcttcaagcgatactcctgccttagcctcctgagtagctgggattacagtcatgtcaccaccacgcctggctacttttgtatttttagtagacatggggtttctccatgttggccaggctggtctcgaactcctgacctcaggtgatccatccccctcggcctcccaaagtgctgggattacaggcatgagtcactgcgcctggccatgtgtcacaaattttaatgcatttaattcacagacaatggagcttcagacttacccctccatcttctccttccccttccatgagctacatttagccgcattggctatgcatccttgccaatctggccaggtattgccaactttaactgcatccttatagacaactattcatagagcttaactgaagagaaccacgggttatatattagtctggagacactcttgcctgtcacactcttgttgcttttgtgagcagtaagttcaaggcacaagacttatcaatccaattgagagcttcagttacaggcagacttattttttcaccctgtccttcttgtctccaatgcattggaaaggttcttaatcttatactaggtggttcttagttttcatgaaaattttcagttattcctaaagacacaaattgctgatgtgaataagggtgagcgctttcagagataaagatgctaacaaatcagtgcaggtttgtgacaattttaaactgcttcagaccagctagcatcaatattttttcttggtatttcttctgtttttgatgaacgatgtctactatgcagccacaagctaatactgctgtcttcccaggaggcagggccctggtgtcttgggtatcatcacccaaacaacgtttcagaataatcagtccctaaagtaatgctttgcaaaggcatcaagccactgtgatttgagcctgggctttaggatctgggggttctgcctttttctaaatttgcatattgcttttcccgttcagaatttggagttagtaactgtggaagggcttttgggatgggaggcagtggtggtgctgattatgtttccaagtgtaaaaccaatcagctgggtttggatttctgggagcttgtgtggttctgtatggctttattcttctggctgaaactactaaaggaacctccaagttcctgcacaatgttgcttccatttgccatgtgcaagtatttttatttatcaatggccagttagtgaaataggttgtgaatctgtgtttcttaaagaaaagccaacactgggataaagaaaaagaatgcttgcaattttctagataagctagaacatgtcagtatgtaaaatgagaaaacaaaacaaaaacgtttctttctgttcagggtctgaattatctggatttgacaaatacgacaggcaaagtcaatggaataatcagcatgaatatgcctattcaggcctatctttgcagcttactttttaggggttgttgggaggttcctttcttggtatctacttgatgattttttttcatcttgcgagtcttccttggaaatagaatgaatgaagagagcacagacctcggccatcagggatgtgtgggcttaagttctgacatagccacttagctctctggtgctggacaagttccttagcctttctgagcctcagttatctcacgaaaatagagttgatcatcatccccctttggtaacgaacagatggaatgacgggtgtagagcatctgttacacagtgcatgctctgtggcattcatctggctgacctgcagcccactctctgagttgagaacaaaccagggatgatttgacagagatagccagtccaatattggttgaaacaagaaagtttgaaaaggaaaaagatgcctacagtctcttgagacacgtggtttccattctctatcccaactttactgctgacttgctgtacatccttgggaagttgcttaacccctctgaccttcaatttcctgatctgtgagatgggaataatattaatggctccttcctcctaaggatgtagtgagcgctaaatgagttaatggggatagagtgtttacgtcagtgccccgcacattggaaggggggacatacacctatttctgctttaccattctgcctgtcagccattctgatcttcatgaagacacttggcctgctcattcctcagtggttatagtaccagctgcatttctggaagctcactgctggctacaaaatgaccttcaacctccaagtgatccaggcttttcctagcagcttccatcaatgtgcaggggttgaggaaatttgtcgaatagcgacattgaggatatgagtcaaagagagggggagatgatagattcatatcttgaagcatgtggaagtaatctggtttttgtttttgcttttttttctgaagcagatccaggtgtctaaatgtaaccattgccggcttaaaaaaaattattattcacaattgaaaacagatataatgttaaatcaagatgagtaattattcacatacataagtggaaacaggataatttggttacaattataaagataaacatgttggtttttaacccaagaatggcagtggctttgatccttttttcatttacattttttgtcttttgaaaatttttaaaaatttcagacaattttagacttatagaagaattggaaaaataatacatagagttcccacattctcctccctcagcttcctttaatggtatcgtacgtattacataaccatagagcattgatcgaaactaagaaattaactttgcaacaattgctagaatttacttggatttcatatttttccagtaatgttctctctctgttctaggatccaatccaggtcctgcactgcatttagttgtcatgtctctgtagcttcctcccatctgagatagttcctcggtctttccatgtcttttcatgatcttgacactttcaaagagggtttttttttttttaatagaatacctctcaatctgggattgtctaatattttctccatttctagcttttaattgactgcactaaacatactttactgtttaggccaaggatccagtgacaaataggagtttttaagcctaatagattgtctagatatttctgagactagcctggctggttattactgatactggaggttaggagtatggactgtggagccagacagcctggattccgcttctggctctgtgacttacctgctgtgtgactttgcaaatgttacttgacttctctgtgccttgatgtcctagtctaccaattggggataataatagaatcaattcttagggtcacggtgaagatcaagtagaagtatgaagtgtgtagaacagtttttcacaggtggtgatcactcagtctgtcttagcttttaccattgctcaccctcctctgtagccctcctcatcccagtccaggcccagtgacctgctgatgccactgcccgggtctgcaagtacttgtgtggctctgaccagagtgacgactttgcagcaaggacctggggtttttagacatggttctcgtggcccaactgaaatagccaccttgactggagggcccaaagcttggatgctactaccacacgggggttccatctccagggcctcctgctgtgctcagctcaccagccacccacatcctgcaacctgcacctgcagtcgtgagatctactcagaaatggccccaggcccgcttcttctactctgctttactgaccactttgttctgggggtttttgtcctctcacctgtgtctcctctcttccccttgttcctctgaattcacgtgaagcggggaaccacaatgataacacattcagcttctctggaaggactgactgggtttgcttctcagccataattcaacttcaatctgggcttcaatgtcttggtatctaaaagaggatgatcgtagtaataataagtatcattaaatgtaatgaggttttattctctgcagggcactactttattatttttattttttattttttgttatacaatttttatctgaaaaatccatgttacacaaatagtcatacagtaagtcctcacttaatgtgtaaaataggttcttgaaaactgcggtttttaaaaagtgaaacaatgttgctatatgccattcaaataccttttgtttgtatcaattaaactatggtaaaatttgttttcttaagcaatatgttgcttcacttacagttacagcttccaagaacctgtcaacattaagaactgactatacacatgtacgatttatataggtatgtgtatgtgtatcaccttacacatttatatatatagatatatcttaatgacacagtgccagcaggctccctactaagtataagacaaaattataagataatagttattaaaaaataatagatggcttaatatttgcttagcaatgttctaagctcattaatgacacaggacatttaaaaaatctagaaggtgagtagatacttttaaccagtggtgtccaaccaaccctttgaatgagaggacttttttgcttatctgtggtacaaatatcatgaaaactatacacaaaccctttttctttttagctcatcagctatcattagtgttagtgtattttatgtgtggcccaagacaatgtttcttcttccaatatggccggggaagtcaaaaggttggacactcgttctttaaatttggggtttggctactgtctcatctatcttcaaattgtaggtctcttttctttgctccagacaggtgaccagatctagggaggccaggtctctgtaattctccaacaacacatcgctatttaaattctgctgggcagggtccaggcatttccactcttctggagagaattctgtggccacatccctgaatgttaagagttccatttctcagcttcgggagtgtcttggagtcttagctataaatcattcaaagccagcaagtcacagagcgagggaggctgtggtagaatcacctaggcatcccagagcagaggacacagggcagtgaagccctaacctgcagggcactactttaaatgtcacctctattattttatttaatcttcatcacaaatgtatgacatatctactaacataatcccacttcacagatgaggaagctgagaaacacagagtttaagtaacttgctcaagatcacacagctaagacacggaggagtcagcattcaaactcaacctggctttggagccgacgttcttaggtactacatgtgagggttaaataaggtaatctgcatggagtacttagcaaagtgcctggctcagagttaatactttgaacttgagctatattaatcccatgatctgatttctgtttcctctgcctcctggtgtatatgactctgggatgctgtgttaatcattgacccagtgctctgtatcatggcaatggctccttgcccagttctcagacaagtatgccccttgcccatgctgcattagccctaccacttcctgcccagcagatggggcacccacagcccctcaccttgttgcagcacagcctgcagccctctccctgtttcacatctactcattttctggggtctttcctgcgttcccacttagtttcaccttgtacctcaacctttgtttctgcttctctcacccttgtttctaccttctgctctcacccacagcctgacctcagcccctccctagaccagctgctccccagccctttgcttggttcctgggacctgttgtttggcacagtctaggggcagaagatcatgactggcatccctaccgggtttgtcccattcatgagggggcccaacctggctatggaaacagcagcacttggtcatgggtcttgaggtctgaaagaaggtgttgaatggagaaaggagctgaaagggcagctgctcctgcagaagggacagtgagcaggagcaggggtggccaccatctcacacgcccttgcctcttcctgtgactgggccctgctcctccaggctttatcaagtcaccatctctgagagaaggtgccccagtgccccacacatggctcatgccctgctctggtgtgtcgtgcttctgaaatgtggatccctgggttgtacataggcctgaatctctgatcatgctgtgagcagtgggcagaagccagatgccccagccaggctgcctgggcttgcatcccaaactaccatgtgctaaacaagttcgagcaagttacccaaatcctctgtgcctcagtttccccacctgtaaaatgaagatccttaaaaataccaacctcacaaacttattttaaggattaaatgaattaatctaaatgaagggcttagaatggttcctggtgaaaaatagttattgattataattctaagagttattgattataattacaagaattattgattttaatcattggttgtagattcttactttgagttattgattacaatttattattgtctataagtgctattgattataattataacctactgtaattaccttgatgataattattgctacaataataagttattgattataattcttactatgactgggaacttcttgaggccacccaaagcaccatactcatatttgtggctggtcctttgctaggtccttcctggttattgagaataagtttgcaataatcacctgtgaaactgaggataaatatctcaaataaattgtatggagtgtgtacttgagagatactaaaataacaggaaaagctaataatctagctttgggagttgtcatgtggctaaatgcccagtccccagagccaccaaagcaggggagaggggaccaatacacatggtgacaccataagatagcatagcagaatgaagccatcacctgggtggcgtgatttgttgatgaaggctctgtaagtgaggagggtctggtccagctgaaaaatgagtgaaagatgcatctgatcctaagagacaagagaggccaaggggcagccttgtagtttctctttaccaggcatacttccttcccttgccctctccatcccttctctactttctctccaagtcacctctttgtttactcccttctgtcctacattgcaccccttttggtagttgcagacagtggtgaaggcaccatgactgatgggggagccagctgctgggccagaccccaaggcttcttcatgcattgtccaggagtattagtggctccagaactctcaggctactatcattttgttttgcatttgcttttccaactgaaacaattttagacctgtagcctggttgagtgaatttcaagatcaggtagaatagtgcttcttactgaaactctcatgtgtttaagaatcacctaggattctgatggaaatgtggtttctcattctgcaggtctggttggggcctggggttctgcatttgtatggggctcctaggtgaagtggatggttgcttgggtgcactctgagtagcaagaagtcagcctgttaattcagctaattgtacttctgactgttcagcaaagaaacaaaactgtgaaagtctctcaagtatcgttgcagatgttgcctactcctaaaaacattaaatgaggtcacagagtctccctttgcaaagatctcaaggcatcatgggtgtgttcccacccctggtggtactaagggaaacgaagtcacaggttcaggtttcaattctcaggggacccatcagcttcactttgctccactgttgtagactgcccagtggccattggtcaccaaagtcattgtagttgacagatggtggcagggagatgaagagtgagaacaatcagtaaaacctgagagaggaggttctgagggtccagctggaccatggtggatacttgcctatgtcactaggaagggagggaatgtggattggagccaagttggtgctgtatcaaagtcatgagggaagctcataaacaagaggcaaatgaaacaatgggaaacaaggaaatggggcttgcattcagagtttcaacagtgggtgagacaaagtaggttgctttaggatgaatgaggcaaagggttctcactgagggtagccacctggcctacaggtgctggaccaaagtgaacacagatgagtcaactccacccattgtctctgcaagaaaacagctcaaaactcaccccatgaatgagagaggaagatgccaccctttgggactgtctgtaccctggcagaaatggaatgatttatccaaataagcaaggcaagttttcatatatttcatgtattcttgcatatatcttagccatcttttcttttcctgggccactcagcatgtgcagctcatgttcttcttggcctgggaggtcatggaaattctacctggctgctgcaatgctggggagggatactcagcaatggggatttcactttctgccatccagttcttctttcagacactgcctccagtgagacagcctctcacataagatggaaagatgcacctgctctcattccccgcactgagccctcctctctgctcttagctctgggtgggagctgctctctacctctcatgaaaccagagtacaccttataacactcactctgttctttgggcttctcctccaacccatatgtaccctctgtcaggctgctgagtatttgctaagaccccagtcttcttttctcttggtgaggcacagttgcccaaagtcaccactgtccttgttcacttgagagctgaagtaacttaggtagttatttcagaagagataatttgactccttctttgaggaggcttagcccggcactgacaatgtgccaccactaaaggtacctaggaagaggtggaggaatattctgtggccactcctgcctcatcactttccctaaagagagtgagctctggaatcacataaacctagccccagttcttagaggatcacatgcttgaccttcagcaaggccaagcctgtttcctcaactgaagaatggggcaagtaacactgtatttccacatcaaggtgttgtgcaggttaaattggatgctgtgtataaagcccttgcctggctgatggtttaagtgcattataagtattaacaattattgttactgacaactgtgctacagcctattggagggtcacgtatacttttcccttcatgcctttgcccacactgttctgcctgaatcatcctccctcttcacccccacccaattttgtgagtctggtaagttttactttaccttatcccaaattcttgatttctgacaaccagatactttattcctatatggactgtttcttacttgactggctagggatccttatattatgatttttgttagcattagttatatatttgagttactgccatgctatcctgccccagctcctgcctgaatacatacaccttgtcatctgggctgacgatgatgatcagttcttagagggcaaggtcagctttgtgtcacttgcaaggcagagcttaagaggcagtcaataaaaattcagaataaatgtattgaatcttgaagtagaaattctaagttctttttagggatgtgtatgtggctgtgtcattctctggtaggtgtgacgatctcatgtgtgggacaatgctttggtaagcatcaacaaaatgtcagaccatttagcttctttatccccaaggccccatggctttttatttccaacctccagcatgagtttccattcattctttacatattttgttttgcttcagctggggagtgggagagagcctcaaggcatctggtaaggaacctggagcttggtaagctgattctagtatgaggatggaaacctacaacacaatcagagctcatgagtgatgctgaaatataacttgtaatttttatactgaaagtgttcaatctctcaccttccctcacctcgagttacatgacaaaaggccctctttattacttttgtctctagagcccccagtctctgggaaggtggtgggggaaaaagtctattctgggatgtgttatttttgctgcccacatattatccactccagagcaggacttgatgttttaaaaccagggagaagcctcgggaagggaaagcaagcagcatatgtagtatgagctctcccagacttgtgtttttctataatgttaaagtcttctctctaggcagtgatttgaagtggagcttaattaaaatcaggcaagaagtgtagaaatggaacattaaaaatagaaaggtacaggaatggcactgtccatcccacccctgtcataatgtcagtggcagggctctgcacttcattttgcttctccaagtggtgctagacaagacctctgtcctcatctgctttcctacacaaaatggcatatcccagggtaagctggcatgctttgggggccaaagacgtgtcagggacatcatggctgggcctgaatctaccccagctgatagcttatgtgtatgcaccattgttctctgtatttcagtgtaaggcagctaagcaagcctgcagagctaggaaaaataaaacaggacaacagtaaacatctctgacttaaaatattcatgacaacccttgctgctttttagaacagttgtttagtagagtgggaaaagcaaggctacgtgagcttgatagattactcaactggaccttactttctttatgtgtagaatggatatcaaaatgcctaccatatagatttgatgataatcaataataatgtcagccataattgattgagcatgactgcaggccaagcattttttgaaagtctttaggaggtagggactatgattatccccattttgcagaccaggaaagagaagctcagggaggtttagtgacttttccaaaatcacacagctaggaagtggtaaagcaggactcagacctgcagctgacaagctgtaaattctgtgttgtcagtagctcaaccatacctgagtaaagatccagggaaatcatatagctttactcaaagtgtgaaatgaatgttctgatgaattgaaagatgattttagggggcacatgagatgattgggggtgcattgatgagggattaagttatgtcctatcatggggtgagaaaattattcctttttaaattctttttcaatctttctgagtatgacaaggattaaactttgattaggtggtgctgtgccttcaacaccgtctaatactttttaacctccatttttaacaaacagagcagatagcagaggcttagcagacaataatatctagctagaattcagtaaaaaatggttttatgtcatattcattttcacttccaccctctatttatggcaggtgatactggatttttattgatggtagtgatctaaaattttgtcttagaatacacttactggagtacaaagaatcagtcagtgttcaacactattacagaaataatactagaggtggcgttcacatagggcaaaaatagcagaggctgaacatgaatgactcaagcatgagaaatgctgtgatagcctgtgagcagttttcagctgatggtagcacgtggatcataataaacgtcaaggacagagtgaaggaaaaatgtaactctctcttctgatctcttaataggagaaaagaaatgagctgcttatgaactagatgaaacagtcttctgacattttgggtatgaatttagcctgttctgaaggctgatgggtaaagcaggggttcgggaaaatggagtttgctttggtcttcattgaaccatagaagctgagtgctggggacggaacttaagctcaggatcagatcctgtgttagacacatgagggtccagatgcagaaggcatttcccccaaggtcaccctggctgagagcaactgcagtgtgaataattatttcatccatttctgggtcaagttcctcatcttgagtctctttttcccacaacagccaccaggcatgaactggcccatggtaaaacccagatagctcagggtcaaatctaccagttattgtaggtgctcaccaatgccctggcactgcacaaagcaccatgcattacaaagaaactccacaaagagaaggaagtaaacaactgtctccaaactcaaggagatgacagggttatgctatatgatttttacccttagatgagtatcatttgggaggtaagtagcaagtctgctatgatagagtcagttaggaaggtcctcccaggagtgagaagccctgtattagtcagctttgaccaggttctgcttcaataacaaccactcccatgtttcagtgatttccaacaacaaaatttgattttgtgtctgttacacattggttgcagggcaactgcatgcatttactgtaccttcttcacctaggacccgggctgaagcagcagccagggccacacctctcttaaaccagaggggaaaagagcaatagcagaaccatggggaacttcctaatgcttctacttggaagtggcatgtgttacttctgttttgtgttggtttgggttcctaggagcagattttacaacacggcttcaaactcatacagattattagggagatataggaaacatcaatcagggaatggagaaatgagacaaggaaggcagtcaggagaacatgtgttatcaagctagctaccactgtggacaactccagttcagtcccatggagaaattctggaaaacagggcaaatcatgtgccttagaattaccctcctgaggaacaagggagctggtatatttacacaaccaaaccttccagacatgggttgaaggctactcctgaggagttttaatttcctagcacttccagcccgtgtgtacacacagagagtagccttctagcttccgagaaagcactcagacaaagagatagatgctagcagttacaagttggctggagtgcattagagggacagagaggagggacgtgagtggggcactgagagcatctgagacatgctcacatttctttatccaaaggaattcacgtggcaaaggacgtcttcagggatagagaagtgtaatcctcccacagaggtgcagcaatacttgagaaccaaaacaggccctgaaccctgattcataagtataataaactctagttgacacagtacatgtaatagatggttaactgagagctaccatccagaccagggtgttttgacctcagcactattgacatttggggctggctaattctttgccgtggaggactgttttatgcattatagcatgtttagcagcattcctgtcctctacccacttggtgcccatagcctccctcccctcacctcataattgtgacaaccaaacatgtctccaggtgttgccacgtgttcctaggggaaaagtcacccctgtagagagccactgatgtagaccatatatgcattgctaattcccaaggaactgaaataaattgtggatgcctcgatggaggtgtgcacagcctgatgggagagacagacagacagacatataaactgtaatggccagtccaccctgggtaacaacaatttgaattatgtaaagaaaacagaaatagttcaggagtggtaaacatcacttttgttgcaggctggggatggtcagggaagtctgcagagacagagacagcagagcggggttttaaaggatgaagaggagtttttcggatgagtgatcccacatgtagaagttaatgtttctgcttgaaaatggcatgtgttactttggttctgtgttggtttgggttcctaggagcagattttacgacaaggattcaaactcacaccgtttatgatctttggtgattgtggagacttgggaatgctacactgagactgatgctggaaatgctgacctcagagccaggctgatggcagggctgtagttacaccagctttaccatatcattgatcatgtgtaaggagcaatgtcaagggctttggaggcacttagaggagttgcccaaatggcatggatacaacccagccccagagggaccagaagcacctttgctgtattattttagtcaagggagaaagccagcttattcctcggcctcctcagtatcatctcctgacccatccactttgatgtttgtcccatgtgttgtgcaaacaaaactggatgtggatttgtcacttaacatctctctgcctcagtttcttgacctgttaaacagagatcataaggttttctctcttgctagtttcacagtcttactctaaaacgcattggctgtgcgttcagatgaacctgccctgctctgccatccaccaggtatggacttctttttctccattttctcatctgtaatatgggcttaatacccacctcacagggttgtcttgaggactgaattgtgtgatgtctataagccctcagccctgcacctggcacacacagtaagagaataaatgaccataaatattaagaaataggttgagtgtgcataatgatagctaacttgtattgagtgcaggtgatgttccaggcaccatcatgggggtgtgtatgtattaacctatgactacaataggtatcctgattatctccattttacatatgaagaaactaaggctcagggaaatctgatcacttacctaatgtgtgtagttagtgagtggtattcaaacttcagcagactgttgagcaagtaattgctttgctggattgtttagtgcttggcattttaccatagctctttgaaaagaaaatcaagtctttaggtagatagttacattcaccaaatgattagagccagtgtagctactactgggtaaatgaacttttcttactattgactgaggcccctttagtacacttacagaatattaataagaaagtaggtgagaagaaatgtatttttaatcacagtatctgagctggcttctcagtgtgagtctacatgggtagatgatgaatcaccccaaactgaccctttccagaaatgccttgtgagggcagcacaaaggaaaactttccattgcttaactctccccacagcccccaccctcagctattgaaataaaatgccaagaggctgcttgccagctcctggacaccacctccagaacagcagggagtgtcttctctccctttgtggcagggacacatatggtgttcttagtgtcagagcaagcagactctgttccaagagctgcttttcaatccagcctctgtgcatgggatggcagcaatggaaaacagtgcagggtcctgggtctgagggtcatcctctttctgccggtgcccctgccacctgctaagctcttgtctttggtggaacaggaaataccactcagtgcaggtacagacctagcctgccttgtacacctccgtgtcctggtcctttgtagatgcttgaatgagaaccaatcagtgaggaaaaggtatgatgcccctcctgttcaaaacacctattgagtaccaagtactacacccagatatcattttcttccttctttctttggctcaggtcctagctccagaccttgtcagccacgtgtcctggagcaagttattttctctctctttgcctcatcaagaagatggacataataataattccgtgcagagagttgctggaagaactcagtataaagcaactggctgacagaaagtgctctaagtgctagttcctctgtcattttgagaccaagccagatgtgttagagatgtccctgggggaacttgtatcctggaatttgacagcctggagagatctgaaggcattctctggtcctgtaccccaaatgaggtttgaaaccctccaatgagctccctattttgtaagttacaaaacctttggcaaccgagaagaggcatctgtagcaactttagctgtgtcccaagctccaagccatccgcccttccttccccactaccaggcaacagcctgctgtctgcctcctactcagacatccacggtctggaacaaccccaaaattgtcatctggggcagaatacacaacacccaaaagatggttttgctttctgaacctcacctgcagccactcctggcttctccacttcccatcctttatgacattcatgctgcacacctccccttctctagagagacagtaagcctctccagtgagaggcagggtgtgcaatagtaacatgcattggctcaggagtccgactttgagggtctgccgctgacctgctttgtgaacttcagcaagttgctcagtctctctgtgccttcttcttgtccccaataggaataatagtagtgctacctcatcaggtttttgaaagattcaaacaagccaaatgtgaagcatttagaatgtggctggcacatagtaagtcttcagtgaagattagctagtatcattgtcctaaagtgataaatgtcaccaaaagggggagtagatgctgcaactagaagttggatgtagtcaggctgctaagacatgagacctgaaaatccagtttgctgtggatttgccatggattcccatggcgactctcaaaagcaaagttgctcaaaggccatttaaggctcataaagtcaatggttgttttgcctaagaaatttttgtggaatgaacaaatacaacatagtaaggataatcataatagttaccatatgttgcatgccacattccaggcactttcacatgtattgatggaattaattttcactacagtcccgtgaatagttattattattatcatctgttgtatgaatgaagtatttgaggttcacagatgttagataatctgtccaaggccacacagctcatgagtgttgaaagtaggattggaatctcaggtggtgctccaaaagatgtccactgcaggccacaggattctttattttaacatatttatctatggctgctattaggaaccaactgaagaacagtcctctctcagatgttatatctcctgtgaaaatttcagattgggattgaaatggcccagggaggggccagagacagctatgaaagagccacagatatggtgaggagtgtgtctagatgatccagacacctgcggggattgtgcagagcagagctctgcatcaggccacatgcaaaacatcttgggcatctgctgtctggggtagatggtagtttggagagtcccctggcccgatctccaccattgcctataccaggtgagaactgaagctccattctctgtgctaacctctggtcagattaataattctatatagcagcctgaatcctaccaatatgatgacaaaagtctttaattatttatttatttttgagacagggtctcactgtgtctatcacctaggctagagtgcagtggtgtgaacgtggctcactgcagcctcaacctcccaggctcaagtgatcctctacttcagcccttggagtagctgagactgcaggcaggcatcaccatgcccagttaatttttgtatttttgtggaagacttggttttgccatgttgtccagggtggtcttgaactcctaggctcaaggagtcctcctgcctaggcctcccaaagtgctgagattacaggtgtgagccaccgtacccagctgacaaaagcctttattcctttctaccctaagactaaatccaactctgtggcttagactcagagtcctctgtgttctcacccatttgtcccctcttcttaacctaaaggattgccatgatatgggagattttgatgcctgacaaggggtgggggaagcagaaaggaggagcgagtaacaaaggccttctccagaagtgagggaggccagcctggacacagagggcctgtgtgctatgttagggagcttgatctttatatagaagactattgcttcagagtatgttccttggatcaataaatccatacatctatatagttcttacataagaaaaataaaacaaacaaaaagttaacatgttctgggtaactttgggtatggcttggttaagcaaagttgaatgtttcttcactgcagaatttctcagagcctttaataaactaatgtacattcttagcctccaaaagtgggcagctctgtcaaatctgatttgacccccatcatcttaaaatgcaggagcaggccagtcatggtggctcatgcctataatcccagcattttgcgaggctgaggcaggtgaatcacttgaggtcaggagtttgagaccaccctggccaacatggtgaaaccccatctctactaaacatacaaaaattagttgggcatgctggtgggcacctgtagtcccagctactcaggaggctgagacaggaaaatcacttgagcccgggaggtggacgttgcagtgggccgagattgcaccactgtactccagcgtgggcaacagaatgagactctttctcaaaaaaaaaataataataaataaataaacaaaataaatgcaggaacattttaggtgattagtgttctgagaggcacatctgagaaatggtgttatggtttatggaagccatggaaggtgacatggagactagagtccaaacctacctcaaaacaacagcttgacctttcattttacatttaattagaaaacaaagagaggtccttccacaaaatccaggagtaaattaagctatggaacatttagaatttaagcatcaagaaaagatcagaagctggggcatctctgggccttaaaatgagctagtttcttctacactgggatttagaagttaaagactaatgactttactgggtcagggttaaatgtcaaagagcaagtcttccaaggatgaaatggttaatggtcactggggttggaagggtggtgttagagaagtgaaggtaggcacccagggaaggtcatctggtgtcagagctactgacaggctcaggggcttacccacaggctgctgggataaccaagtagaaattcacaaaacgtgggagggaaacagccatggttcttgcctaaggagagaaaagggacatcaaaggccaaagatgacactgatgatgactttaactcccataattacacaatgtccaaacaaacagtgaccttgggctctcgaaccaaatgacaaaagtcagtaggacagtttgtgacgtctttgtcatcaaaacactgggtaggtaaactttaaagcccccgacagcttttcctctatagtatagcaggactgtgatggaaggcacagctcactccagcactacgtgaccagcacgttcctggagccgagagaatggtcaggtcagaaatcttggatgggttaagggtgggttgtgaggggtgatgagaagggaggaatcagtttgcattcctggagagggaggagaaatgaaaaggcagaaaaataggttattataagacactcatgagagcctattttggtatttggcaaagacacttgcttttcccaggggctgaaataatgtgatttcgctcctgtgaatgagatcttccttaggaacattgaggctcagagaaaggagtaagagttgggaaatataatctgattttcaggaaaaacaattggtttctgaaacatcttaggatgctgaataaaatgcacaggtctctgcatgccagtgcctggcagtgagccaagtacttggtacgctgaatgaattaatgaattaatggaagaaccagagttatttttatctttccacatcaaattattccccttgaaatgactgcttaaataatatattaattacatgatactgatgatgactttactctcatgattacacaacatccaaacaaacagtgaccttgggctcctgagccaaatgacagcagtcgataggacagtttttgatgtctttgaggtcaaaacactggctaggaaaactttaaagcagctgacagctttttctctgcagtatagcaggtaagtggtgacttggaaaagctgtatttttttaaatcaaaatcatcatccatgattggatcttgaagaattgaagaacccaaaagtgtgtgacgcagtccttaatgaatatgtcctctactttcagcctcatgttctttctacaggttctaatgttagtgtcttcagccatcactgtgaagaaattgacacaaatgaaaattcatgaattgcagctctgccatttccctgttgtgtgatagctgtatttccactagcaagtgcaagtggctttaactaagattttattgtcaagcagtttaccctgctgtcaaagtcttgggtccaaagatctaaagtaaaagtgtcagcgatgttgcactgctgcctgtatttggtgggaaaattagcaggtctggcttttgtggtgaaaaaggtattttttaatagtactaaaggcataagatatttggtcccatgttattctctgggtccttgttaagtatttctctttcctcttgcaacgtagagtgtgggtgtgacaatgaccaccgcctcccgcttgctattcatttattccttcaaattactctttctttttttccattattggaaaaaatggctagtacttatttattctctcaacacattattcagtgttcactaggttctgggtgcagctttagggtttaccagaagtgggacaatattcagtactctgttctttcacatgttagtttctcttttcagaagtccaagatgatgataaaaaaataaaataaagaagtcaaatgaaacagaaattgcaaatagcagttactcaggaaaccagaaaacattgagaaagtctggaaaaattggatttgagcaagggctttctgtatttgcttggcagtgtggatgatacaaagttgtgaagaacctggtaattttccttgctacaataatataaattacttattctgttcacattttggcctatttctcctgtttaaaatgaattccttgaagttcatttgtttatagtttcagcttttaaaaacatgattaatattatgatcataaaagttctacatgctcattgcagagcagtattaaaacatataaatgtatgcataagggaaaaaaatcacctgcaatttcttcaactagagataatcactgttgaaatgttgtattccccttctagtcataacatacatcaatactatttgagatcatgttacatactttatatctgttttctaggcttcccccacctccctttttttttttagacggagtcttgctctgttgccaggctggagtacagtgacacaatctcgactcactgtaacctttgcctcttgggtttgagcgattctactgccttagcctcccaagtagctggggctatagccacctgccaccacacccagctaatttttgtatttttggtagagacggggttttaccacgttggccaggatggtctcaatctcttgacctggtgatctgcacaccttggcctcccaaaccgctgggattacaggcatgagccatggcacactgcctttcccccctttttttaaagaaaaagaacttaaaccattttaatatactataaaattcttattttaaattcttttctagccttggttgttgtcctaatggtcactcttatattgtgtggacaatatgtaggacctgactatgctcagctttatgtacatgcagtaggttgccatatgagaatatgggtaaggaattctgtcttttaatggctctgttatacttcactattgctgtggtgtcatttgtttaactattttgcaggaattggacttgattgtttccagttttcttattttataagtggtgttgcaaatgaccatctttgtattgcatttattttacttagagattgttccatgcaccatattcccaaaatgaagttacgaggttcatgaacataaacagatttataatgctttttacccattttgagaaagattaagcctgattaatactgctctcatgttgtccgaatgtacttgtttgcacaaagccccactcctgtctaatttaagtcattgatttagattttctgcctttaatagagatctaaaattaatggatttgaatttgcttttaaaaactcttactttttttttttttttttgatatagagtctcgctcagttgcccaggctggagtgcagtggcacgatctcgactcactacaacctctgcctgctgggttcaagcaattctcctgcctcagcctccctagtaactgggtttacagacatgtgccaccatgtccagctaattttttttttcttttttcttttgtagttttaacagagacggggttttaccatgttagataggatggtctcgatctcctgacctcatgatctgcccgcctcgacctcccagcgtgctgggattacaggcgtgagccaccatgcccagcctaaaagatcttacttttttataataagagatacaatgcttgccataaaaatgagcaaattaaatgagtaaaaagttaattattgcctgaaataacaatacttaaataatgtgttatcagaaaattagttttacatttttatgtaataaaatttacataaagactttatatttgaaagaataaggattacttttattctcattttccccatttttcttaatattctctctaaattgtcagagattttacatttgtcaatgccattcacctgcttagtctgtttcaagacaagcgtaaacgacaagagcaaaggaatattctagaccctcagaagaaatttcaaatgtctgagaaggatccttgaattttgctgccccagagaaaagatacgttatattcttgatcaaaagtaggtgtcttggaatgcaccgcatttttgcccacattgcaaccaagggccttctgcccagggttccaggggagtgctgggagttgccttgagtcttagccacctgaccaagtgcactgccataacgcatggccagaggtgcccaggaacattagcagatttttgactaagcctttctactatctcgggacaccaatgaggtcaaggatcttattcccagaaattttatagaacaaacacacacctgcccataacatcactgttcaaaatcaattagggatattgtatgggtcgattataagtttgtgaggatgaatttggaaaaaaacatcatggggtcccccagtctaggtgtatttgatggtattcaattcattcaggaactctcaaagtgtagctaagtacaaagttatagaatctttagaatcattactgctagacatcctacaacctgctcagaaggccacaccaactttcatgggcagttggccatgcaccatgtatttcacataattattttgtttgtaactaaagagaaacagctctgtaatggacagtgttgttatccatctgctgtgccttacatatgagaaaaccaaggctcagagttacctaacttgttcaaggagaccatcagctaagatttttttttttttttttttgagatgagatggagtcttgctctgttgcctaggttggagtgcagtggcatgatcttgactcactgcaacctctgcttcccaggttcaagtgattctcctgcctcagcctcccgagtagctgggattacaggcacatgccactatgcccagctaatttttgtatttttagtagaggtggggtttcaccatgttgactaggctggtcttgaactcctgacctcaagtgatccgcctacctcagtctcccaaagtgctgggattacaggtgtgagacaccacgcccaaccaactaagatgttaagactggatctataactggcctcactccctctacagctggtgcattgaccacttcctgctgttttgtgcagacacgcagcaaaacaaggcagtcagcaggcacaacccatggatgctttttttcccagtgaactccagtacacttacaagtgctaatcatctgaaatggtgcgaattatggaaaaacacagaaaaaaagccatcaaagattattggagtgaagatgcagtaggagggtgtgaagggttgggaggagggaagtcaggtctctctgatgctgagattctgaaagtgagctcaccatggttggtctcattcacagaccgtcttacctttggccttttttcatcctgagagtaaactctataatgttttaagtctctctaccaacaaggtagaagagtttgaactcacattggccaaaggggcctgccacaagggaaaaattctttgaaaccaagcaaatttttacatcatgctctattgtttgtttgtatttctatgtaaatgttatggtttaaactaccatgtttctctgattataaatgtaatcatttataggagtttccattgattttataacagcattgggataagggaaactacattcattatgagacacattccattttcagaaaacttaaaatatgggaaaatgtataattagaacggaggaaattcaggaagattttgctgttcgtggaagatgtgtcatgtttctgttggggctaggccaggcttctggtatctatttgtgtccacatgagagtaggcacgtatttcagtatgtggtgcaaagtctcagatgtgttcttgggtgacagggatgcgggcggttgggggtaaaaagtgtaaggaattgcccatggctggctccttctgcctccctgacatctgttgggatagggtttctcgacctcggccctattggcatttgggtcaaaataattctttgttttggggggtgatttgcagcaaaaccaaaaatgtgtccagacattacaaaattgcccctggctgagaaccactgtgttagggcaaaagagaaacgttggaagaggtgggccaacacagatcctttgatttcaggattttttatttattttatttatttatttagttagttttaagaaacatagtcttgcgttgtcacataggctgggtacagtagtgtaatcgtagcccactgcagcctggaactcctaggcttcaaggaatccctccacctcagacttcctggtagtggggactccaggtgtgcaccatcatgcctggctaatttaaaaaaaaattttttttttgtagacacggggtcttgttatattgaccaggctggtctcaaactcctggtcccaaccaatcctctctcctcagcctccaaaagccctgggattacagacaggagccactgcacccagctaagactttctttttatatcagaaggcctcttgtcccagtatgccactaataggatacctttgccatttggtaatagatttgtgttttggtcttctatctgtataacgatcagacccaagggtttctagggactcttctaggcatgaaacttttctcagtagttgccaggattataggatttttaaccagtggtaccattctaacagtgctgtctgttgaaatcctccctccttaaagtttaaatgtatattaatattgcactaagtcctatgatcatactctttattcacttaacatcctttcaagggaggctttggcctgtaattgaaataggagtaaggagtcactgggagccagcggggcaaaagcacaataataataaatgcctaaatactatttaacatgcaattaattaaatatcaacatggtctgttgatggtagaaaggtgacaagactttcttcttttctgaaggtctagctcatgtccacccttgctattagggatatttgccaaggatcattgaaagaaattttgatcatctgaggtgggaattaatcatttgtcttcgagctctctattagagactcacatattttaatgtagctaaaatttattggaaaccctattgtgctcttaataggtgatttagcagtgaggaaacaagttccaattctgttctcaagaagggtacagtctagtgggggatgatgcacatccatcaatcacacagatcaacagggagttagactttttcagttaggtcagggaagcttcctggaggaagcaacatttgattcaagattggaaggatgagcaggagtctgctaggtgaagaagagaagctgaggcattgcttctgtgcatttgtatgaacggttaggggagtggaaaccttaagagcaaagagacaagaaaaggagaatgtcatcccaaccccatctgtctctatcagaaggtttctaaacagccacattcactccattctaagtcacccttagttgtaaattgcactcacaatgtaataatagtttttcaagtaaaaagagacatactatagtagataaatgttgatattgactataatatgcatcccaatttcagaaatgttaaatcttaaaaaaaaagcctatcttagaagcaaggacataagatatcaaaattcaaagtcggtcttgaaatgattattgctattattgtcattgcttttatattgaggtctctggttgtcactgctgggacagttttcattggccatctctgctgcccaggcacatgcttccccaccacattgataggatctcttgcttcctgctcaaacctcccctcttttctccccagctccttaattcccaatcccttgagttcccattgatttctcgcatggtgcagtttagccatgcatgaactcactgccaaccatctcaacctaaccctctgaaatgtatccagtaaggtgtattacaaaacaagggcagctctctcagtgcagtgagcatgccctgagacagcttgcaattctagacaggggtgagaatatcaggaggagaaattgtgccactcctttgcagaagggaactggggccttactgctttctcaagaggcagcattggaatggcttctagaaagatgggcttggccttgggatggtgaaaatgctctctgtctgtgacctctggggctcagccaaggcagggatggataaagaactaacctgccctgcctgccagccaaaaatagtgctaactgcgtcacagagcttttggtaattaaaccttccctctgcagaaagctgtggcttggactgataagggaccgtggatgtgttaaggtaattcactcccaacactgacattcttcactcaacatcagaagcaggctggaaaactaagtggaactagatgaagtttgagattcataaccagggcatggtatgtaagtagcaaaaagacagaacatgtgccaacaaagtttcttatagattaagtagttctttgtttttactctgagtcatatggacttttttcctttttggtcagtcagcttagttagcaactttgtttctgatcataaaaatgcttcatttttgctgtagaaagttggaaacataaaggaaagaagcaataaggaagtaaaaacccatccatcatcttatcattcacagatagccactaggaaccttttgtgtccacttttttctcgatgcaatgtacaatttttataaaattatgatcagggccagatgcggtgactcacgcctgtaatcccaccaatttgggagaatgaggtgggtggatcatgatgtcaggagtttgagaccagcctggccaatatggtgaaaccccgtctctactaaaaatacaaaaattaacagggcgtagtggcatgcacctgtagtcccagctactcaggagattgaggcaggagaatcgcttgagcctgggaggagagggttgtagtgagccgagattgtgccactgcactctggcctgggcaacagagcaagactctgtctcaaaaaataaataaataaataaaaataaaaaataaaataataatcagagtatatctgcagttttctgtcttaccttttaaatgtacacacaatatactcccaatcatactgtatctgatggggtcattcaatattacttgaaaaccagactgtttttagcttataaacctccttagggcctgagctgagtggggtgaagtatctgggagaacacacgtccatgtcagtaggaaagtgctctggtctggagtgttcttcagacaggatccatggtcccaggagaaactgacatgctgtctgggaaagcagagatgttctggtcattttgggaggcagagaaggagtgggaagttcactggggagagcattatgcagagagaagagcatgggctcgtaagtaaagcattcctggcttggattctgtctctggcactaatcagttgcctgatcatggttagcctacctaatcctctaaacctcaattttctcacttataaagtgggactaatggtattatgtatttcactgggttattggaggatagtacctgactcagagtaagtactcaatgaatgttagccatcattagtatattatttttattaatctctccaacaaggactgggtcagctgattctattggatgaggatagtgggtagatgggttcactctttaagataatctttaaaaggaagtaaaaatattggtggcttttagtattaatatgttctctcagagagaaggtgtatttaaagtttaggggagtcagaagaatgaaatcttaaggctccttccatttcattttccagaccatgaattgaggacacttcagtgcctggtaggagatttgggttcagaccaacaagcagctccaatctcagcccaggcatcttcctaatcaggcttgatgggcagctgcagctataagtatttaaataaatcatcaaagggtttgttgcatcagccaagctttttagagtcccaaatttaaaagctgagataaaatcttatcttgctgtgtctttacggaaggatccccagatacctggggttaaggtctggctcaagtcaggacctaggaagcagcatatgttgactggagagacctgggtttgaatcccagctgtgcatgttattagttatatgaccttgggcaagattcacaaccttagcccttctttaccttctcaccctaatctggggtaaacatttgtaccttttggggttgttgcaaggattaaaagaggcaaactctgtgacaatgcctagctccatgctggacttaatataaatgctcaataaattttgacaccatcttctatcccccatatcctacaagataaaacaagacagaatgagaaagtgcttaggtttcttcatctgtaaaaaggtaattggaaaaagaaaattaaaggcagaagctcactcagcctctagggtctgggagatgtcttcttgttgtttaagttttagtctgtactttctaaaaaccagtagtgggcctctggcatttcctggcacatcttagcagataggtattgaatatataccatgtgccacagtactgcgccctttgtatgggtgatctcatacagtgctttcatttcatggaggagaaaaactgaggctcagagacatgaagaaactcacccaaagtttcttagctgttaagtggtggagctgggattggtacctaggtctctctgtctcggagcccgtgtttgtaactaccccgaacataggtctctaaccatataggactcctactccttgctggaaaacataagtacaaaacagacaagaatggccttttcaattactaaactgtaagccccctgagcccaaagactgtgtgttccccgctcaatcccctcccaggcatgcagctaataggaaaccctggagacatactgggaatctaagaatctgggttaggattcctttgaaatgcagatgtcctgtgagaagtaagcacctgatttcttatatacctgagttcattagatacttatctttgatatgggagagagtagagctttctcagatacctgggtggctagctgcagcgaaaggactgaaaatctggaggggaagagctcttctctctctttattttctcactaacggaagggagtaaaaggcagaggaagtgggtctgagatgaggaagacagtaccacagggttcataagatgtacacatcagaattcctggcttgcaggccctgggcattggctggacaaggtttgttggtctctagggcacagaaagaatctatgcctccgaggattcatagaaaattaccacttcctctgtcattatcttttatttattattctctgtgatctgttggtctttgattccctttgtatttttgattcttttgtgattctccctttcgatttggcgctggtttttaccctgatctcatctgtatcgtccacacctcaatgcaggcttcccgcgcccctgcccgggctcccgcagtgcccccatctacatccctgcctccagtcttgttcattgctgctgccagattcacctccctctatgtccacctgttttggaaccttgccactcccatcctgctctgagcttttgctctgtatttcctctgcctgatgtatcctctcccctttcctcttccaaccaaaagaaagtctacctatagccttccaaactcagcacacatccttctcctttgggaacctgttcccaatgattccctcaatttctctgtctttttttttttttttttttttgagaccaggtctcggtctgtcgcccaggctggagtgcagtggtgtgagctcggctcactgcagcctccacctcctgggttcaagcaattctcccacctcagcctcccgagtagctgggatttacaggggtgagccaccacgcctggctagtttttgcatttttagtagagacagggtttcaccatgttggtcaggctggtctgtaactcctgacatcaggtgatctatccgcctcagcctcccaaagtgctgggattacaggatgagccaccatgcctggcctctgtcttcttaattctagtagtgctgatgtgtgcctacatcagctggtcatgtgcttcctcccctctgcttagggcattgtttacctcttggacatgacttctcacctgtttgctttcctcccatctatgtcaggagttctttaaatttaatatttcttcttcatttattgagtatctgctacatgcgagcaccctattgagggttgagaaacaaagaggaattattaggtttgctcatcaataaataattgaggtgagacccttagaaatgtgtgtccattggcctgcttcaattttagacagttttttcaccaactccaggggaggccaagccaagcatgcctctggctcttgcattccacatgtctcttattaaaaacagatggcccaggactgctttggccattgcaccagttgacaggcctgttcctggggaggctctgcttatgaattctagaatcctttagctgcattagtaacaattcctcctgcagagcaatgaggggatagtgtctgtgggctgggcactttccatgaataagaaaggcctgaattcaacccaggtgccgcccagacttgtcacatggagcttggcctcaggcaaggccaaaatgggaagctagcttcagaggaagaggtcccttctgccacttctgaattcctgaagctcacaacaaccagcttctttgtcctcatttttcttaggaacaaatgtattcatttaacaaacatttgtggctgagtgtggtggctcacacctgtaaactcagctcttttggaggccaaggcaggaggattgcttgaggccaggagtttgagaccagcctgggcaacatggcaagacttcatctgtattttaaaaaattgctgagcacaatgatctctgttttcccagtgcctgcctggctcagggcctggcaccgaggtaaatacaactgctgctctaaataagctcatctctaagaaatgaaatgaatgcaaactattgaaagcaaggaaggcaaatacgggcatgcatatgtccacttcttaattttgtgtccacggcagatactgctaattaatcatagaactcattcactttgaatctggatttaagtgaagattcagccttggaatccttctgaaaacattgctccagcagccactatcagtgatttggactttgcccatgagatgaaatctgcttgtgatcctttttctggtctttaaagtggtccaaatgccactggaagtggggagcaggggttcaaaacagcaagtatattgaattaccatgtctgtccagagcagactaggagactccattcatgggagtgtccaaaagtaacaccgctattgcagaagccctgaccattgctccttcgcacttcttctcgctctcatggctcctttctgtctgacttttgtggactcctcttcctcctcatacccctcagaagtggctgttttgcagggttaaactcttatccctcccaaactcttttttcttgtctgttttctcagttggagagctaatttcttccctcagctttttctagctttttaaagtagttaactgtcaaatctgtatcttcagagatgtctttttccaaagtctaaactcctccctttggcactgaagcacttccaccatctgaccctatttatctttccagtcccctttccagtcccagctccttgcctacagaactactgctgtgagcacgaggtcttcttccatcctgtgtccaagatgtggggtacccatggggagtcctgctcccatgccttggcacatgcccctgccctgcccctcttctctgtttggtctgtcatatccatcctatgagtctccgcttcactgtcatttcactgagaaagccctttctgacttctttatgatttcagaggataataagtgccatgagcagaggatcttactagcttacgctttgagtcactcaacaaacagttattgactgcctcctctaagtccctggcgtatatgacgtgaacctgccctcaaagagcctacagtctgtttacatttctgtcattagttactcttgtttataggtcatgtctctgccattagatcgaatgccttgtggtccagagctgagtcccagtcactgtatcccctcaatcccctgggtatgccagatgctcagcacatcccgagttgagtgaaaggcagcttctttccctgtctggtttgctggtggctcttttgagtgtgtgattcttggggaggctcataaagggttgcagagctggcaggggaaggagtagcccatggagactaagggaggaagaagtccctgctctatgcttgaccccagaacagcaggaggtgggatggaaatggatgcctcaaatggaaagcagccatggctaagatgcattaagaacatgggtctaggggagggatagcattaggagaaatacctaatgtagatgatgggttgatgggtgcagcaaaccaccatggcacatgcatacctatgtaacagacctacacgttctgcacatggatgccagaacttaaagtataaagaaaaaaaaaaagaacatgggtctgcgttttaattgttgcagctcttatgcttaatgattgtgagaccttgagcaagttacttaatttctctgtgacttggtgttctcacctgcaaaatgggtcttaaaacaatgtcaactttatagagaggttgtgaggtttaactaagaaaatgagttaaaatgaatataaaacatttaaaataattattggtacaagcattggctattacttagattttcctggcagtgggatttactggtgattttcatattcatcattgtatttttctgtagacaaaatgtatattatttagctcatctggaaaatatattgtaaaactatttctttacctttttttaagagacagggaaagagtctggttggtgaaggggttatagttaactctggtaacctctgccccaggtgctgtgtgggtatttcatggtgtgattggtgtggggaggtaaccttcagctccccgtcttctgcctgtccccatcactggtccccctccagtcccaacagtcagatgctcacagtggcggtgctgacctttctgaatggtgcaattattggcgcccagtgagccttgcacatggaacagggagtgaaatcacccagcacttcctctgcaaagaggatgtgatcttcagacagtgcaatcacaggcaagtgacctcagtttcctcagaactcagcagaaggttctgaaagctggaaggccatttgcagaacccaggagagaaaggagggaagacaaggctgggtttgcaaaagcaggagcaaggtctgcacgttttatgaagtgttttacagtggagctgtaattggaaccctggtatttagcaagagttatgaggtgtgatggtcttagcactgcgagtcctttggcggcatatgtgatactggcatgaaacaggccaagcatcatggactggattgcttgggttcagcatgctgcttaaatcggcttgtttattatttttaaaaggactatttttttttactcttggggcattcaaaactccacttagagacaaaccaaaaatatttctcagttacgtgctcactgtttgaatcagagctgctaagcctaattggttggtccaattctcttactaccttctggagattaaaagctcctctagctcacttccaaatcagagtggatggaatttgatccaatccaggtgctcagggctccagaagcccttcctgttacagagagggtgagtgagcaggccgaagattgtgctttttattgctcgaagatagtttcctagtccttgaagctgagaaagcaggaagggtctcccattctttttgaaattcagaacaagcacattgtctgaagagggaggttggccttctttttgtctttcaccatgtgagggatggcagccaggactcagccttttggaatcacagagccatgtcagaagcaacaactggttggagtagaacaaaggatcttaactaggggctgtgggtaaaggtcttccggggtctgaaattgtaaggaaagtttgtctgtatgtgcattttcagggggagagttccataatcccatcaagcatgcactcacagaatttgacctgtgcactgtgtagtgagagcttgctactatttgtagcatataccaagcttgcttctgcctcaggcctttgcacttgctgttccttctcagaatacttttccccaagatccacatggtcactgtaactttcttcaagtcactggttaaatgtcacctcctgaccaccttatattaaatatcccgctcaacagtacattgcttcattgttctttacagtgcttattccatatgacattgtttgttattacctccctctttcagtatgtaagcctctatggtattcactgctgtatctgtagcatatagaacaatgccaagcccagagaagatgctcagcaaatgtctgttgaatgggtaaatgcatgaacaaattaataactttgattatacttaggtctcacctgtaaaaaaaaaaagttttaatgatgggtaaaaaaggatctgagttctcagtggggccacttctcagccatgtgtcttgggttccagacatttcatctgctatgaaatgatcacctgacattgtaatagatgtttaggcagaagttttcaagggatttcacaatgcttgtacatcattattaatttctgtttttcgaatacaccagatctgtgtgtgtgtgtgtgtgcctgtgtgtgtctgtgtaaaaatgtgtgtgtgtgcctctgtgtgtgtgtctgtgcacatcctggtgcacagatactattattattattattattctggtgcacagataataggttatctccatttgaaaatggggatgctaatactactgctactgatgtgctagggtaggtccccaaattcccaggggacctccatcctggttggtgtccaggctcttgacaccagagccagaaggaattcaaggactagtcaggaaaatagtgaaagtatggagagttattgcaagtgaaaagtatacactcaagaaaggggagtgtgtgtgtactcaagaaagtcatgcccagtggggtttgcggcttctaactttacgagtttctttaaccaaggagtggaatattcatgaaggttcctggaaaaaggtgaagatttctcagaactgtggtgccacccatttttacaccaaatatggttgtttcggaactgtcatggtgctggtgggtgtgtgatttggtatgttaatgagtgtataatgaggtcctaggtgaaacctaggtcaaatccagtgctatgttgggtccagtcggtcctagccagcttgtcccacatcctgtttttcagggtcttttatcagcccctagcctatgctgctaattcaacagtttcctttttgctagttttgtgaaactgcttctattctcctgcaaccaccctgtattattcctgtctcactactgacacaccagtgtggtttttgtgacttgtctgaagcctcacgatgtatcagagcaggatagtgatagaagtccctcttgcaaactccagttccactctagaaccattagtgttccattctggaaaagatgtcctagtagttgaatataggtggtcaagaccaacttggggctagtattttctgacacatgaacttgagtgtgaatgggatataattgcgtctgctactgaatgtgtagggttaaagttcagaaaagagatgctgcattcttctctaatcttataaaatttcattttatttttttaattttatttttttgagacaaggtctcactctgtcgcgcccaggctggagtgcaggggagtgatcactggtcactgcagcctcaacctccagggctcaagcgatccttccacctcggcttcccaaagtgctgggattacaggcatgagccaccacacctagccattgttctctaatcttacatgaggcagcaaaagttaccccactagaaattattatgctgtggctccttttgaaccaaggcaaaaaaaacaaacaacaaacaacaacaacaacaacaaaaaaaacactcatttgagaggtacattacatctgagagaaataaactctggtctcttctagacaaactgctttgattttcaagcataaacctcagactcattttgggcagaaagttactttttgtcggtatctgcatcgggtgagcttggaggtaaatcttcacacagagcttagtacatcctggataacttcctttataaatgacagcttcttagactcatcttttaaaagttaatatttttcttgttaaaacaaatgctgtcttcttccaaacatcttagatggctgattcaccatttcttaaaagtagttttaattgtacagcatgatacatttatatgcattattttaaacgtaaaagcctagcaaaaaccctacaaaaatatataagaatctccatttacacacctgtctgcaaaaccctcatccattcccagaggtaatccttgcctatcattttttaacttttctttccagaatttctttccaaacattataaatatacacatgcatatgcaattttcaacttcttaaatacatcttagatatttttccatatcagttcatatagcaatgcatccttctttttaacaggtccatacactttcattgcatcaaaatatatcagaatttattaagcactcctctattgatgacatttaggttattactcagttttttacttttataaacaattctgcaaagaatcgacatctttgtgaacatacatccacatttctcaagacagatgttaagaaaaacattttgggatgtgaaaaggtattacatatcttaaattttgatagaaactaccaaacttacccccaacacccaataccggtttggactcccatgttaaatttacctgtccttggcaatcacagatgttgtcaactttttaaagatgttttgtcaatttgatggcaaaaattggtgttttcacttactctgccctgattgctaaggtagttgagagtgttttttgcatgctgcttgtgatgttctataccttattaggtttttttaaaaaaatatttttaaattatactttaggaagcggaacatcacacaccttattaggtttttaacagggttttaaacattttcgtgaatacgactatttcagaaatgcttcttctccagggttgctatgcagctggtagttaaaatatgccttcatttattagtattggtaggtagtaaatacttaaatacttgttggtaaggtgcgccaacccaagttcactttcctcgatcttaagtctcgttacccccacttctcccctctacctctccggcctgggacctccctaggaggcaacaattaagaggttaatatgtagcacttcggggcgaacctgaaccttccagaggctgctctaatgcagttccagcctctattcagatagtttggcatattgatataccatttaaaaaatattttgacaagtcccttccccgctgtcaaccaaatgtactcaatctgtgttttatgtaagttcctggcgtctgggagattcacagtaacatactgctggtttgctccttgaactggtcactgctttgtttgtcaatttctcaggattatgcttacataatttccttttgaccttagcctccacaccataatcccagggggcacactgggggaataagatgacccttatgtaacttgttacataagagtccagagaagctgggtctcacttcagtgtctgcacagttttctaagaaagttcatttagttttctgttgtctctttcaatcaataaattctttaaaaaagcattccctttacttctgagatgccaaaggggaggggggaaccaggccaatactgattgcttctttgtagttggcacttaatggaagtgatcccatctaatttacgctacaatctttttcctttgtatggacaaggaaactgaagctctcagggactaaagtgagtggctgaggatcatacagctagaaaggggtagaagtaggctttaaagccagacacaggttcttcctacagaatatgtgtgtgattcagaattgtgcaggacagctctgtttcatgtcctattcttttgaagtgatagacattgtccactgactatactaaagcagatagggagctcagatcattccatggacttcaagtcccttagaggccagactgtggacagcccttttatctctgtgccagcgttgccctgccctggctccagcagtgcccagatggactagaggcctttgtggcctgtattttggactccttcctatcaccctttgccctttacctctggcttggcactgagttggggcagacaccaaaggaacaggtctcatgtaacatcttttcctgacatgagctgggtcccgttgcttcttctctctgctcagagaagtgacacgtgagcagagagctcatgtcagtgtgtctgcatggctggtattacaaagcctcaaggaaaaaagcttaacaagaaagcctgaggaaatggggttttggtcatttaaattttagggtcattgagggatgaagccaagagggctttgtcgttaaatatatttttgataattccctcttatttttaatcctaacattgaaaaagcaataaatgcacataggaaaacatttaaacagagctaaggagaatacagtgatctgtgagtcaccctctcatttgagatacccattttctcagttctccctagaagctgctactctcagcaatattctgtgatctttccagaaatattacttgtaatctctatatatacaattatacatgtatatatttgtgcttatcaatcttctgtgtgtccaatatccatccctccatccatccatctgcccatccaacttatgctcaactctcatggttgaaaatcattaaaaaatgcttgaatccattctctcatttgatgtggtgtgttgagaccagtggacccctgacagagggtcctgtgagtcaccaggatccctatctgaaacccagtcctcatgataaggtcctccagctggtaaaggtgtaacattgagccacacactaaccaaacatctccctgagagattctgtttccataccctgcactgcatgtttccttctggagtctgtccccttcaaagcagagtataagaagatgccctgtggaacggatagttccagttaggtttgattttatgaaatctcttcttcagcaaaatctgtcctgactgactccttgacacagaagggccctgacccacaatcttgttcaccgcattgagattccctgattccatgtttcttgctgaatgactaaatatcccaacagagggaggtcaagtttctccccagcaaaaatttttcccagttaaatggcaagaatgaagagctgacaaatggctatgacatcactctttgtcataacttgccccaaattactgcatgagaagccagtactctactgggtcttgccatgggacagtcataagtagaaaacaagatgatcccccaaagaattgccctttagagagcaattcaaagacaggaaaatcacccgttggttgtgtccctgcttctagccagatcttctagagagctctagatgctgaccccttcatcttgaaaagctcagtggagacctgggtcctagcctctgccacttactggttatgtgatcttgatcaggtgtatcttagtgggtaaagtaattgtgtctatttcaaaggactgttttgttttagttgcaagtgagggaagcctaccttagtctgacttaagtgaactagagaatatatcagcttgttaaccaaagagtctagagataactttaggtgtatctggatctaggagctaaaatcttattattaggactgattctctttccatatctccttgtcctcaaacaaaggcaggtcattcccttataagctcccggcagctctggacacatcctagcagctaagaaacctcagcaaagaagagctcctccttcccactttttctagccaaagtcttaggactatatctcactggaccaacttggtccacatgatcacccacaaatctatgtggttatgaggatagagtatcctgattcaccagtcctgagatgggcatgggtcagttccatccaaaccatagggacgggagttagaaggggaattgccctgagaagtcgagaggatagaaccaaaagagtagcaagcagacactagggaggcaaaaaacaacagatttgttatgtagggtctaaaagaagggggtcaacaagtgttttctgtaaagggtcagataaatattttagggtttctgttgcaattactcaactctgctcttggagtgcaaaagtaaccgtagacaataggtaaacaataggcttcgctgtgttctaataaaaccttgtttataaaaatgggctgttgactggatttggcccatggctgtagtttgccaactcctgatctatgcagatactacaatcttcttgtcccacatattctagagacctgaacaaataagatctggcacatgcaaagcacttaagaaatgctagttattattatattgttattatttatgctatactaaggataataacaatgataatgttgatggtaattataatactaattagataatgagatatgatgaattatgagtcataagtcagcagtgtattccaggactgtttctaaactgttggtggagcttcccctccacatactcatagagctggaaggcaggggagaggcatccaactcaaacatctcattttatagatgagtcttaggctcagataagaggcagcacatgcacaagttcacacagcaagctggggcagttttggagtttgcagctgtttcttctgcaaccttaaaggactctaccctataggtagagtctgtttacacctactggtacacccatggtacacctgttataccatggtacatctagtacatttgaacatgcaggtgtagttagatagatattccttgagttttggatccatactgagtagtgtggtgatactgttggtaatattcctgaactggtggaaagacctgatttgtgactagcatgtgttatatgactcatgagaactccctgctgctgagatgactcagatgtctgttttacacaaagattaccaaacacctctcgccacgtttgaaaacaatgaatagttactcactgcctttctgactaccctctttgtcactatttctattcgcttagcatgctggcagccatttaaacagctagtcttctgtttggctggatgttggtaggaggagtcttctttaatcccccatcaacatggatacagagaggcctgtgggcacttttctctgtactcagtgtagacccattcataaaattcttcatgattctggcaaaaccctccctggattttggttaaccagcagctctgcagtagtttaggaggtggatattttacaaccacaactctttagctctttttttccccaaatttatttccaactttcatcactcagggtcatttacataaatcaatgcaaataaatatttttcttgagttaaaaaatgttgtggaatctgctggtcccaagtactacagagacctcagtacactgaatggaaaatttgggatttggtttactgttctaggccaagggtcagaaaacatttttctgtaaagggctaaagagtaaatattttaggcttcatgggccatatggaaagccatgagttgctgaccccggctgtgagtgcttgtaatttataaatataaaattggaggatggagtatttgaattggctgcctagttacttgagcatagtcctacaaactaaagtcttggatttgggccaatgtaggtttagctatgtgattctgatgcttactaggtcattttaggcacattggtggccttagttccttgtctataaaatgaggataataatagcactctatctgtttgttccttcctcctacttgcttatagaattgttgttgtgaggatcaaacaaaggaaaccacttatctcagagctagtatgttccataaatgttgagagtataatcaatactgttattaatatcaaagcccattgggtgaaagcaagtattcaagagcaaacaattaatgagctgattgggtcaccttcaaagggttctagatagagatcatcaagaaaccttttttccttctctttttaattttaattttaattttagttgtggggtacatgtgcaggatgtgcaggtttgttacataggtaaacctgtgccatagcggtttgttgcacttatcaacccatcacctaagtattaagcccagcatgcattagctatttttcctaatgctctacccccacccaccccaccccctgagaggcccagtgtgtgttgttcccctccctgtgtccatgtgttctcattgttcagctcctacttataagtgaaaacatgtggtgtttggttttctgttcctgtattagtttgatgaggataatggcttccagctcaattcatgtccctctgaaggagatgatcttattcctttttatggctgcatagtattccattgtgtatttgtaccatataagaaaccttttttcagcatcttctgtgggaggatgtctgaagagactggatcagatttttaacaacattttttaatttaattttttaaaaattttatttacttaatttttttgagactggcttatgagactacctaatttttgtttttggtagagacagggtttcaccatgttgctcaggttggtcttgaactcctggcctcaagtgatccacctgccttggccgcccaaagtgctgggattgtagatatgagccactgacttgggtgagactggatcagattttgcttggcattgttgtgaagaccctggtagtaactcatgatagactgtcttcctttctccaaaaaatgaagcctcacattattcaaaggaaaatctcaaattaaaaatcctttcctgagcatttccttcagctatagagttcagctaaatggcatgcccagggtctggatcatcaacacagtctgaggtgatgagtgattacaggccagaggagtactgggacctctgctaatttgttccccgtgacttcatcacagctgcccttggttgtgcaattgcggttgctatggctgaagtttgaaagaacttggcctgaagctgcctatatggccaatatcttgggggaaatatagctttcaatagataggttttatgggtatttgtgaagaattagcagctatgaggttgaggttgggtatgttgatgagactggaggagaagtttgcttgagagtggcaaaatacaacaatacacaacaatacacacacttcccccccatcaatgcatacactcttaactactttggacaattgaaggctatgtctatgatgctgtaaataaagaaatattgaagaatgttattctcatcttaaagtatcaggttctttcagctgccatattgtaatgaaaaggggttgggtttggatgaagacagaccaaggtgtgattcccagctgtctactcctagctacccgacaatggaaaagttacttaactttgctttctcatctgtaaaatgactaacagtcacttctcatattgtacaaaatgtctgtcttaagggatgttgcaaaacaaaacaaaacaaaacaaaacaaaacaaaacaaaacaaaacaaaacaaaacaaaattgctctccagccagactctacaagctgtgagtccaactcaccaaatcttcacatcctgccccccaaagtagactggtaaagaaaaggctgaagtcatgtctcagcatttgagcattgctctctagtcattgctctagagagttctaatcttggggctactgataataaggggccatgcagagaagatagtgaagccctcctccacccgctgtaacctgctagtcagtcatcaatgattcttaaagcactgcctctgcctgctctcaggaaggtgagatgacgcatcacttgcttttgttttcacacctgtcccctgggaacctttgctcaaagttgtaaattatgtgacatctttagtaacaacaacgtgattcgctctgttaaatcactccctacctgcttgtagcctggtgaataaattttcattccttttttgaagattttacttaagcatatgaagaaagctcccatctgtacaatgatggaaccaaaagggacaggggctgctaacttaatgagagccaggcaggtatgcacatgaaatcaggaaacagtttgctttcctcttaacactctcttcagaaagacagcaatggaagcctgatgataaatagtaattgacacttcgcattggtgtcaaggagacaataagggatggtggggactgtggcagactggaaaatccatgcctatctaagggacaatcacttcttagttctatctgattgttgccactcagggatctaggtttcataattataagtggacaaaaccctttagtaactttcaataataatactgaaacaaagtgcattgaagtttacttaagaaaaacttaaatgagcagtggcttgcacctgtaatcccagcacttttggaggccaaggcaggtagattacttgaggccaggagttcaagatcagcctggccaacatggcaaaaccccgtctctactaaaaatacaaaaaaaaaaaaaaaaaaaaaaattagctggcatggtggtgcatgcctgtcatcccagctactcgggaggctgaggcatgagaattgcttgaacctgggaggcagaggttatagtgagctgagatcgtgcctctgcactccagcttgggcaacagagcaagacactgtctcaaggggaaaaaaaaagagaaagaaaaacttacatgattaacaatatcttactataaattaaagggttttagaataaatttccaactcttcgtcattaacattgttaaagttactgcttatttagcttagcaataaagaaaaggaatccttatcttaaggtgaataaattctgtgacatctgttaattttggtataacaatataggtaaaagttatgttttctttttgtttctgtttatggtttttgctttttttttttttcctgaggcagagtctcattctgtcacccaggctggacagcagtggtgccatcttagctcactgctgcctccgcctcccaggttcaagtgattctcctgcgtcagcctccccagtagctgggattacaggcatgcaccaccacacctggctaattttagtatttttttttagtagagatggggtttcaccattttggcaaggctggtctcaaactcctgacctcagatgatccacccaccttggcctcccaaattgctgggattacaggtgtgagccactgtgccccctcactgcaccctgccaaaggttatgttttttgagtagctgcgaaagagacctgttcggagagtgaatacttgatcagctgtgtgcggatggggaatgagaccactccagggagccaacctgaggaacagttggcagttgtttgaagatccaccaggtttagctcagtgggctaaggaagttaagagcgagaactgaagtaaaagagaaagaggagagagactctgaagagtatggggaggaagaacaaatttgcttataatgaaattgtattgcatgttctctaggtagcgtgtgctgcagacttcttccctttctccccataaaatacaaaaacaatttctgccctaaggaactgtggagtcgaatctgctctcagataaaggacaatgggctgagtgtgtgttcagggcagatggggagagggaggatggaggaagaaagcatgattgtccatggcaaaaaaaccctgccatttctgtgttaactcaaagccctagaatatatttgagtccagagatctcatctggacttatctgtaagtcttatttgacccctctgtcttaattttgtcatatacataattcaatctaccagcttttgctgaacacctattaggtgcctggcattgtacatgtcattatatagaggattcaaataaaaacaggacatgttccttgctttgatgtcataatttaagagtcaacctgataagtcactcggcgagaaactatcctcagcataaatttgagactttacgagttgagcaggaacaagcctttcttccaaggcacttgggatgaaggcttttcacctcagttgctaaggaattaagtggtgttgatgacccggtagccaacataccacatcatcaccacttccaggctgttgaggagacgtggtgctgctggaatgacttcaggaagtgcataaaaattcaagtcatgatcacttgtggtaattagaagccctagttgcttttggcaaggtcactaaacattagttggagcttctggtggacttcaggtttcctgatcctttccttgtgctttgtttaggcttctgtccaaagccatctccatgggagatgcttaagctgataaggtcctgccactcgctgtcagaggcacctcccagtccctgcagacttgggtccccttagtacctccaaatcactagtctctcaaaaattcttattaaacacctaacatggacagggcccagggatagatgtatggcccttccttcacagagtctaaggcctagtgggagaggcaaaccatatgaatgtgatgaattgtgcaacgttaagatctcagaggcatgaaaagtagattgggggctcaggaaaagattattcgaagagacaacatcaaagagtcacttaagatttcaggttcgaatgtgcgaagtaaaatattccccaaacaccacgaactgcatctgtgtatggaaaaggtgggaagagaatggatcgtgcaagaggatgtattgcacttgtggactgtgccatatcagcacaaagccctgtgaaccagcctgtctccacaagctaccagagtgataaatatacattcttctcttaagaagaaattctcctggtgagaacattacccttcaggggtgactggatggctcagtttatcacttgtaaatttagcagatcaaactagttgagaagcagttgggcagtcagtaaactgactggactgctgggatcaacagggactggatgtttagttcactttcaatagccacaaatttagcagctcattagaaggaaccaaagtaaagaactgcacaagtcctctgggaggccttgaaaggcttccatgggcgatggaagccatttagaggcatggtgttgctgagccttttaaacacgtgattagctaaagagagaaagatgttactttggtctgcatttctctagggcaggaggaagtgaggaagggaggagcagaacacttcagcctacatctcaggaagggaggctgagaagcagtgtctggctgagcatgctgcttctctgagcagatttctagaagcagcagaggtgtgggtgtggacaggaaactctctatgtctatcaccttctgctgaggctttttgtaaacaacaaatgagatagtgtagcataaggtctggtactaccttagtttcccattgttgcagtaacaaatgatcacaaatcaagaggcttaagacaagacaacttattatcatatagttctggaggccagaaatctgagttgggtctcactgggctaaaatcaaggtgtcagcagggctgcattcttttctggaggctcggaggaggagtctgtttccttgcctttgccagtttctagaagcttctcacatgccttggctcctggccctttcctttatctttagagccagcaacattgggctgtgtctttgtcatgctgccatccttcagttctttcttttctgtttccctttttcatgcataagaacccctgtgattccactggtcccacctggagaattcaggcgcatctccctatcttgaggtcagctgattagcaaccttctttgcaactgcagccttagagcccctttgccatgtaatctgacacatccacaggttctggggattaggacatggacatttgttggggcattactctacctatcactggtacagaataaaaagtcaataaatggttctattcattaccagtactccctaccaccttctttctctactgtgaaattacctatgcccttcagtttttcaaaggcagggcagaagcctcagctctggtagaatctgacgtgctggaggttgaaagtgagaaaggcagtctttgatgggcttaggggagtggggaagtgaccagcccttacctggaaggttgtgtgcaggtctgggaggcacaggcaagtaagtagcttgaggtgctttaaccaggatagtgacaaacttgggagaagagaaaaccctgagcagaaacttcatatgcctcaaaggttggtagatggagaagggattcagcttcattttctgtaagtgtcgtgattaagtgtgtgcaccttgttcaggccaagctgggttgccatcccagctcatctactcaccaactgcctgacttggagcaaatgtgctcctctctctgacctccagtttttcatctataaagaaggactaataatagtagctatcttgtgagagtgttgtgggaagtcaatgaaataatgcatgtaaagcatccagtacattgtctgatggcaactgttattattaggtagctccacaggatagaaaaataacctgtgggtaaaagctgcagggaaacagatataggctcaccataaaggaagggcttcttaatagtcaaagctatccaacggcgggatggttagagtagaagtgataagctgccctgcactgcaactgttcaggcattgaccagacattggtatgtggattagctgcaacagtgtcatctgggtgcttttgcaaaagcccagaggtctaggccccatccagatgtgatgaattggaatattcagggatggggcttggagatctgttttgtgctttgttttgtttgtttttatttaatatgctgttttttaaagagtagttttagttttacaggaaaattgagtggaaagtacagagagttcccatatacccctgctcacattcaggtgcagcctccccaactgtcaacatcacccaccagagtggtacatttatcacaagcgatgaacttacattgatacctcattatcatgcagagtgcttagtttacattagggttggctcttggtgttgtacattcatgggtttggacaaatgtatgatgatgtgtatttaccattatagtaacatacaaagtattttcattgccttaaaaaatcctccgtgcttcacctattcagcaccatgcccctccatagttttgccttttccagaatgtcatatagttggaatcatacagtatgtagccttttcaaattggcttctcccacttagtaatatgcatttatttttcctccatgtctttttttggatagatagttcatttcttttcagtgctgaataatattgcattgtctgcatgtaccatggtttatccatttgcccactgaaggatgtctaggttgcttccaagttttgggaattataaataaagctgctataaatatccctgtgcagtgttttgtgtggacataagttttggagatctgtatttttaacaagtgatccagagacagagttggggccactagaccagataatcatttgtccagaggctgagaggggacaggaagactctctagtccagaaattctagggttccatgactgttgtatgtagctcttggatcaggctctggtttggactaggtgttaactttcttctctctgggatccttcccatcccccaacagcaaaatcactcttttggccaaatgttcagtgtcgatgtctattgctagcatgaaattgcctaatataaagagcaagttttctcgggctggagggagagtgggctgaccagtttttccaagtccaggactgacagggatcaaatcctagctctaccatccattacttttgtgacattgagcaagtaacttaaccattcaatgacttcatttttccttcagtaaaagttgctgatagtagtacctatctcctgaggttattgtgagaaatcaataagttcatatataagaagacttagaaaaatacctggtgtgaagttagttttgagtaaatgttagctgctgtcatcattattgtcaccatcattattcttattattaccagttaccagacattagggtccctctgatgggggagtccttcccggtgaagaaccagagttggagtgaacccttgaggttatttcacagcagcaagtgctggctgagtcagtgggaataggatggttcctgtgtgccctcgttgcctgaagggaggagtcagttgagtggatgccattttcttatgatggtacatctggggccatggcaccagcagcatatattgtccaagacagacaacaaggccatagctccccagagctcactttgccttttctctcatttagcagcacttcctctctctatcttccctctccatgtgctagaatgcaagtctcataagtagctacctagtgccttggtgtagatggtagttctaacatgtccattgctctgtaaataccccaagaaagagtatacccataaaacactggactcaaaggcaaaggacagcacaggtttaactttgctgcagaaccacagcacaggtttaactctgctacttccaagcttcatgagcttgggcaagtttcagaatcttctggagcttctgtcttttcatttctaagatagaataatccttccctctccgggatgtcattaactcttgatgaatgcaaaaacgctttttaaatgacacaaatgttattattagcttatttgttagaaagttaaactgatgaaatgttggttattatttacgattgaaagatgaacacaaggagaagagtctgcttgggttcctgttatggaagacaagaaaggaaatgtatgagagttctttgctgttatgggcatggaagagtagaaggaagatgaaggccacaaacttcttctttggccagtgaggtcactctgttataacctggactaccttaaggccccgctgttttgcctcatctgaaggagatgtttacatgttcccaaagtataaggtgttctttgggcaaaattagtacctgttcttttgctgggaaatccaccagtatgggaatcagccatttaaggccaaagatagatatactatatgtatttacttctaacaccataatttaatttgcctatttttcaactttagctcaagtttagcactcagacaaaaaagcacacaaatcttacatgaatagtgtgattaatttccacaaactgcacactcatgtgaaatgagcatctggattaaaaaggaaaaaaaggagaataaaattgctagcattcaagaaacgctgtggaggcctcagaatttcaaacacggttgacttcaagactgatcctggcaatggtatgcagttagcaaagtttacgtcatttatgttttgacatctccttttgtctggcttccagatatggttctgtccaggacctatattaaggggttcctccagacaattctattttgggggatggattgagaatctcctttatactaaggtgtcagtgaatgggttgctttttccgtgagtttctggcttaaatctgggtccttgggtggaatccaaagggatagttctctcaaggaggaaatttgggtctctgggagccagaagtgggtgactttgaaggtctccagggaacttttgaggaagctcttaaacatcatctcacaaaagaattgtgtggcgttttgaatgcctgccatggtaaatcttgcaatttgcaaggtcatggtagtgacttgccttcttgcttgggattgatgctacattgcctggttggctgctcagtctagaaggaagaaaaaagagacagactgcactgaagaaaagcagttgtaaagtgtgataaaaagacccagtcctggctaaggtatacagcacctcacccagtttctgcctagtgcctgaaggcgctgcagctaattaaaccacctcttagtcaacatcccagtcactcccatctgggagactgattggaaaggctcagtttgagaaacttcagaggctagaagaaactcccaggcctgagggccaaatcctgagctcttttaacctcaagctcagggttccagtggctcttggaaggggaatgagtactcatgctttctagcagaaggaccacattttggagggtccaatttagagatgttgatgcttggtagttgggtcctaagatatccttcacggacaagtgcatcttcccgggtcctcatcagtttccccaaaggccttgttgggtgaacctagagtggttcctcgttccatcttccctcaagagtgctgggagcattgaggccaccatccttggtcagggcagctggatcacaaccaccagcagaaaagaaccagacctgctgtgatgctgcccgtttctgctacacactggttttcccaatgcaggtgttccctcctttttttttttttttttttttgagatagaatttcacccttgttgcccaggctggagtgcaatggtgtgatcccggctcactgcaacctccacctcctgggttcaagtgattcttctgcctcagcctcccgagtagctgggattacaggtgcctgccaccatacccagctaattttttgtatttttagtagagacagggtttcactatgttggccaggctggtctgaaactcctgacctcaggcaatctacccgcctcagcctcccaaagtgctgggattacaggcatgaaccacttcacctggcccgcctgctttttacaggacgtgacttccccacttgaaaccatttctgatattccttctctcatttctctcttcttctcagatttgttagccttctggaccactacctcttacaatggagtgtcacaaagaacctgtgacaagaacatattttaacctaatcatccattcattcattccttcaggcaacataaactaattgagcatctactatgtgccaggaagatgctaggcatggtggagacagagacaaataagacacagtttgtcctcaaagtgtttatgttctagtggggaaaacatacaagtaaactgtgaaaaatgccttgagagcacaggcgacatggtaaactgcatctacaaagcaaacctgggagtcatcaaaggcttcctgagggaagtcattcctgagttatttggaaggaataaaagttggtctaagaaggctgggttggagggtgggtagaggatgttttagctagcagagatggtttgcttcaaggcaagctggcttattcatctggaaaggggccaagttgccccggctcaaaacccagagtgcatgccacatgaatcttcctcagcttgttgatgttgtgtgaagttatcaaatgtattttcgtcttgttccatgaaccagaggtgggtagccattacttcagaattgacaggcctttggggactaggctggccaatatgttcctgggccatggcataatctttatttttagaagaggttcccaatttgagatgatcaaacaccccaccccagtctctcattgggccctggaggctcattgttacttggtgtcttatttctgtttggggtgatgagtctatctggaaataagcaaatttgttgggtcaaagctggctaagtctctgcctggggaaggatttcacagaagtccagaggccatatccttaaggttgtactcctgatgtcttttgaggggttatccagtcattccatcatagggaggctgatggcagtgggaccttcccaggcccccacccactctggaccctctgggactttctgtttgtaaaaagcaccagcaccaatgtattggcaaggagatttactaaaactcaacagtgagtaaactctcttactggtcattttgcatcatatgagggatttcaggcaaagaaaggatattaaaattgagtatctactatatatcagatactatatcagtgctttcatagatatcatctcactggagctctgtaatgacccagtgagttgcatggtttgtccaaatgactaaatgtcttgtctcagccactgccagaaaagagacattttaaccaagaatcaatggccatgtaattatgtgattgcattccaccaacttgtcttctgacagttactcatcagagctggtgttttaacatctgtttctgagccaaacaaatacaacttttattgatcccttgaaaactttgtctcctgctactttgtctttgcagcttctgtgtagacacctgaaggctccactggctgtatacctgccattcattgtattagctggcttgggccactgtgcttaggaagcaatatggaaaaaaaggctcttctccttcgatttctcatcttatcttttctgagtgccacctcaccagttccacagtaattgactgtgcctgatgtaggtggtctctcaatgacttagtggtaagtttagcactttgctggtcccaatgccagtttacctgtttgactgtgttcccaaggcattgacctgcccatgttagaaatctagacctgagaatgggtgaaggatggatgaggaattagaagatgctcacgtctgaattgtgtactgaatttcatcccaacccagctttattggccctagaaaaacatgcttccgtaacagataggacaggttaaaaggaacacaaaaacatcaagaaatggttgttgttattgttgctgttggtttgtcgctcatctctacctttccctgtgagggttgtggtatagctactgagctgtctcatggcgaatgaaatgacttgtcttcatggtcagctctaagcttattccatcgtgggtacctagaatggaatccacatctctagaactgaatgctactactatccttttccctacctggagaattagagaatcacaggattttaaatgttaaagaatttccaattcaaccctcttattttatagattaagagaatgggacctaaaaaataaaaatgggccaaaattgatacttaaaccttattgatatcttacattagaacgtgtttttaccatttcatagcagtttaccctactgtctgttgatcacagaaggtaacattatatccattttatcctcatacttttcccctgacacacccatttagcagccgtcctggaattagaacacagacttcctgacttccagtcctatcctggcccaataccatcatgattcaggatagctatacactgtattctttaaccagcccctcgaatggactggaagaagctatagaaaagaggtttgtgaagtctggagtgcctcaccagcaggaccagaaagtaattctgtgatttagcaaatgaacgctgtgaagacacaatgaatagaagaagggactgaaggagactttggaggctgtcaccctttaagtttcatttgcaggatctgtgacaacacggtatctgtcagagagagactgacatcttggttggtaaacatctttgacacagttaaggcaggtcttacaggatctaggaagggtggagggatttgcaggctgttggaaatgccagaaagtcttagagtttcaggcccttttaaagcaggggtggcattcttcaaggagctgggggaaaccctggatgtgggacaatcaaagctgaaatctctgcttcctggttcttggtgctcgagctgatgcaacaggtatttccagcattcttatccaaatacaacaactgtcttacgggagaggacctgcagtgagcactgtttttgttcttgattctagggtgacctagtgtcttccagtagggcaatctctggacatctttatctccccagtacctctccagatcctgaagcctggggccagggaggagaggttagatgtcagcagtggaaggacaggtgggtgaagcccattgcaaacctcacatcctccaggagaaacacaccagttgcttttaggctccctggggagtgttctgttgccacctcatcaaatcagtgaaggtggaaaaaagagtttggtgccagctaaggtgacactgaagtgtgcagcaggaaatctgaatccaacaccacatctaatgagcctattattacaggctattggcaaagcaagggaaatcgaatgctaatgaaaagcaggttctgagaatagtttaaaacttagcgttagccccattacacgttcccttctgagtcacagaggatgatttgcacgataagctgagcttgccttgaaccaggactcacgtggatttgcatgagaaagaactgggcagagattgcaatattaacagctgtttaaataattcaatggagaggctaaggctgaaggaaattatgggctcattgttaaaagtttttaattatcccaacagctgtcccatcacatggccttactttgttaggcagtggaggccatttgagagatcggcctgagttggcgcactggaacttccaacattaaggcattgcattgctaatattcctcaatttaggaggcagtcaagcagaaacacagatggtgggcagtgtcagagagcattagcctcgagggatttggtggacccaaatccaacctgggttttattgctttgttctgtgtgcacagccacaggacataggaagggaatattagtaaaggggtaagcgtgcccactggacgtgacttactgtgtatccggtggacttcccagaccagatttggcactttctgctcattgccatgggagcaaacctgctggctgttgtgaccttaggctttccatctgtatccaactcacctcttcctggtaaccatatctcttagggggcgctgaaatagtcatttaaaccctcataatattcatgatggtgacagggcccagcatgacttattacatattcatttgaatccatgtaaaaatcaacatgtggaccccagagtgtgcatctgggtgggagctttaggatcttggtagtaagacagatttccaaattgtgtatgttccatttatttgctaagctctagacaaattgcataaaatacttgaagaaacccctcatttcttctaggtttctattcaaatgtcccttcatcacagacgccttccctggacacttgatacaaactcatgctgcctccccacacactgctatccttctcctccacccttgatgtggtttggctgtgttcccacccaaatctcatcttgaattggagctcccataatccccatgtgttgtggaagggaccccgtgggagataactgaatcatgggggcagttaccctcatgctgtttttgtgatagtgagtgagttatcacaatatctggtggttttataaggggcttttcccccttttgcttggcgcttctccttgctgccaccatgtgaagaaggacacgttctcttccccttccaccatgatttgattgtaagtttcctgaggcttcccaagccatgctgaactgtgagtcaaacctctttcctttgtaaatttcacagtctcgggtatgtctttattagcagagtgagaatggactaatacaacccccctctgagcacttctcactacttaaaatgtatttatccatgcatttgttctctcactaaagtgcacactccatgatatcaagggctctgtctttttgtttactgcaacatctttaacatcaacaacagtatggtgcctgtaatatgggcccactagaaatttgtggaataaatgcacgaatggtcaaaatctgactgaagtggcatgctgccagtctgtctgcagaagggccttattcccaggggcaagcaaggggcccttttagagctgcttttcaattctcaatttctcttggcaaacattgattaagcactcaggactaggtgttaaagatcacaatcttgccctcctggggctcatagactggtggagaatgtaggcatttaaattaaatccatccttcaagagctgactcaggtctcggccccttctgggaccccttcttgaacattccttcttcttccctgaacctgggttaggcattgttcttatgatttcccatagactcctttgcaagcttgctcatggcctgtacataaagcagacaattacagtacaatgtgctttatgtttcctctctgagtaaaggctctttaagagtaaagattgtaccatacccattactgagtatagtgtctgatacatagagaacactcaataaatataagttatgcctgttattgtcactgttaccaggtgtgtttgcaatcagcatttatatagctgtttgtgtgaacacattttttaaaacttatatcttattctaaaggtatataggcttagaagcagctgtatattatataatattctatcatgctatactatatgatagttcccatgtcagtctctgtttgtgttctgggagacgtagtgattagttagactaattagaatagttggaatttttagattagtcagaatttttacaaagagttcttgggggactctgtgtttccagctgcgagctgagtccctgaattaccttaaaaattattttctatgtgcaaacatcaagaactcttacaagtcttccatatctgtttaattccaagagggtaactcacgagaattctctcaataaatatttgtgggtttatagtattttgatgtagccactttgatgtggctgttttgattcagggcttcagggacattttgttatggcctaaaaaacaaaccattaaagaggcagcaattttgtacaacaaagaaatgtgtggcacaggcatccaaccacattgccaggttgggtgtgtatgctaacctaatgtttgtgtgttttcactttgacatggctgttttgatgcctgacgcttccattacatcatatggatcttgccagaatggttgctttaaatacttcctagttttacttgaataccaaccatgtgcctgattctcatttcaatggcaggagggattcaaatgaagcagaaggcaaggagattaatgatctcaaggggactggagagttttgccaagagctggctaaggaaatacattcaccatttcagaacgcatactacctccattctttgtttgacatttcctggtttagagcttcagattacttgctggagacatgtttaaaaatggaaaaagatcccactgcaaacacagaaatatggtctatccacgttaaaaaggtcattttgatcatttccccctgctgtgttgtaaaatgaattttctgtctgtttcacttggcgaggggaggaagtgatatttgttgctcactgatcagaaaggccctcacccaactgctgtgagcagtcataccctattttctttttcagatggtctgagggattgttattgcacacatatgtcaggaaaccagaagttgcctcagaaattaactagatgaatagaaaattaggccattaaggggagactaagaagcctatattttgactaacattctcatctggtcatgcaatgttattcctaattttaaaacatttgggtagcaagtatattaagcagcctgttatgaaaaagcaagtagttgtatttgggttccaggtcttaactctgagtctggaagctaagttcttggtgtcttgctagaatggcagggcaagtgggtaagccccctgaacaaaatgtcatccttgtcatgaagttgatgggtgttatatgtctcttctttgtgtgcactggagaaaggtactatgctagcatatttttgtttaatttttatgaagtaggcatcaggcatttctttctacaccccacacagctagcaagagttggagtcaggatttgaagtcaaggccctctgactccaaaacccacactattcccattataaccagttattccaaaacactggtctgcagctcggtgttggttccaaaggaagttttctccagtctatgacaagactatctggataatgcaacacctccctgtcttgaaagcactgtcatctgttcagagacacctctctttctaggtgtgaaaggcttattttttttcttttatcaaatgatggtgattgtaaatagcagctaaaaaaatgttctaagatatcaaagtgaaaaattggcctccctatggcaatccccaagcttacatctggaatcttattggcctgggaagtgacaaagctgaggaaggagaagtactcccattaccccagcaagggctcctttgggcagactcccaggatggcttaggcttacctgaggttaacccagaaaagggcttggctgcagccatagctggaggtgatcaaaatacttcttaaagccatacttcttggactctaagtggtattagctcttgccagtttagctgtcctgataatgtaggtggccttttaaaagccacaataggttgaattattattattatttttttactagataaactatcttttccaaaaaagaaataaagcttggatgatcagtgtttgtgacgtttacatgtcaggatggggaaggcttgagcttggagatattttaatgttgatgtaactcaagtatgactctcctgaaaaagtcacctttttactgttgttacaagaagaaaatagctcaggctttggagccagacctatctggatttggatctctattttagcctttgcaactttggtcaagactcaagtaaaggctctgtaacatgataacttccttccccaagttaccacggggggcaactctttggaagatcctaccattgcatgcggtgttcctttcctttactgggaggatccacatcagttctcagtgtgtcctcctgtcctgcttataggtgaccctgagtcacacttacttttattttcctgcagatggttccagattccaactgtgcctggagaggttcctactagtcgagcccctgaaactgtataggggaggtgccagtctctctaatctctgccttcacttctgttccagtgccaacaatatgcccaagcaggtggaagtgcgaatgcacgacagtcatcttggctcagaggaacccaagcaccggcacctgggcctgcgcctgtgtgacaagctggggaagaatctgctgctcaccctgacggtgtttggtaggtacctgcactaccccacccccagccccctcttctctgggactctcctggctctgtggggcagctggtctcagcagccagcccttccaccagaaaggaagccacgtggtttgcctagggccctgtctgcccaggcttcagtgatataattttcctccttacctcctctagccattcattctcctttggattctagtagttcttaaattttttgcaaataaatatcttgtgagagtgttggcatgtggattcctatacttatggagactttgctttgggccacctgaaatgaggtcctgcaatctacatattagcaaacctaggtggttccaaagcattggtccatggaccacatttagagaaccgcctgcatcaagataagcacaagtattgcacaaaaccccactaaaatggctcccaaggtctgagcttcttcagacacatcattaatttaggtaatttgggcacattagctaatgaggtcagtgtggaagatgtttgccccaatgccttgatctgctccagctccatcttgcaagtcctcttcctcctctgcttcaggcctcacccaggcgatggttgttctcaggctattgatacaatcttggtcttaagattcccgtgagggtttattgaaaatggggcaatatacagtttcttgtaatgacaaccacaccatttcctttctcaatccctcccttgttctgcagctctcacttaggtttcacagagaagcagtgaacaacttgtccttcccacccacccacctgcacacacctacctgaacccctccattccatggcctttcctttgagacagatgccttggttgccagtggcccaggatcaggactgggagctcgccacagctaagttcacttaataagaaaccacaggcatggttaggttttccaaaggttacccgccatgtaaccacatctaattcatcacaggacttgaagaagttggagagtgggatttttacctgcagaagaaaaaaaatcaggctttcagccacattactccttcctcatctgtggaattaacactgtagcctgcattcctggaactccatccctcccttatggccagtggtactatgacccaacttgtggtttctgaaagggtcattcatgttggccacccatttgcagagatataaaatttttcttctgggaactttgagtctgtaaagtgaaagatccctgccagcatctctgcctaaattgtttcctccaaaattatatatcttagagtccattcttgagctcccataagatcagcaatctaaaagctatgtaaaaggacatagaagtcaaggacaagccttgagagtgagccatgaggaaattattggaagccaaagaaaatagatgggaagaaaaaaatagaattcacactagcttggtcaattaaatgttcattttatcttgcctccagttacaatgagaagacacacattaaatgccatgccatgtggccaagcttgagctgggcaaggaggcaatatctgtccttgtgggttctttctttcttttttctttttctttctttctttctttcttttttttttttttttgagatggagtctcactcctgttgctcacactggagtgcaatggcaccatctcagctcactgcaacctctgcctcctgggttcaagcaattctcctgcctcagtctcccaagtagctgggattacaggtttccgccaccacacccagctaaatttttgtatttttagtagagatggtgtttcactattttggccaggctggtctcgaactcctgacctcaggtgacccactcgcctcggcctcccaaagtgctgggattataggcacaagccactgtgcccagccccttatagtttatttctataaacaatttctggctccaagtagacaaatagcctcaaataagttggagtcaagttgccagtgtgcactttcataaagccttgagttctccttgactctttgggtgctgactttttaagaatagttggaggtatagaaagttctcttgctagtcatcaaaatcagcttcacttatctaatgttgtttttgttacacattgttcatcatttaatactgcagaagcatgagaaaggtcaatgttgctgaaataagtgtctagagtaagtcatttgacgaaggcaaaaaataaattcatattgttttccccttccttttaggtgtcatcctgggagcagtgtgtggagggcttcttcgcttggcatctcccatccaccctgatgtggttatgttaatagccttcccaggggatatactcatgaggatgctaaaaatgctcattctccctctaatcatctccagcttaatcacaggtaagactacctcactagtgcctggctaacatgggtcatactcctgccctggcttttaattaactgtagaatctcaatttggttgagtgaatgtgatcgtctatgtcatttcatttcagagctttggttttcccgtctctgaaatgaggataatcaaccctaaagaaataaaagcttgccatcgattagtcagtctatttgtctttctctccagcaaaaaaaagaaaaaaaaaaaaagaaaagaaaaggaaacacagccacatgttacaagtgatgatacctctagtggttttaaattttttttttttttgagatggagtctccctctgttgcccatgctggagtgcggtggtgcaatctcagctcactgcaacctgtgcctcgtgggttcaagcgattctcctgcctcagcctcctgagtagctgggactacaggcatgtgccatcatgcctggctaatttttgtatttttagtagagacagggtttcaccatattggccaagctggtctcgaactcctgacctcatgatccacccgcctcagcctcccaaagtgctgggtttacaggcatgagccactgcacctggccttaatttttaatgtctacttttctcccctttctaaattatattttgttcagatactgataaaggtaatagatggaaaaggaaattatctactattttaattgggaattgagggagattggcattaaaaataaatgaaatgctaggtatgaaagccctctgagtttttcagaacaaagttactcctaatatgtggcatcatgttcacttatttttcactaccaccaagttggccaatgtatgatttgttaacaggtgtatatcctgagtcccagcatcaattatctttgactaaaataattaattactttatttgaaagaatttgttcttcctctgtgggcttatactggtattttcctccttaccaaataatattgctcaaacagggtataaattgatgccctttggagactaaactctgagttaagggcaggaagctgagctttggtccatatttgggtaccagccagctaagtgatctggagaagttgttcccctggactggccacctcatgaaagaagtgagtgaggctctggtaactccaggagattcaggggctgagctgggttgaggcttcagctggttgaccagtgaccccagtacctgaaatgctggaactcaggatcaggcacttaggggctaagtgggaccttatcattcagcgctagattgagtgaaagggtgcatttaccatcagtgctcctctataaaccagagaaaatgttctctgcacctgttaacaggtcatacgttggccaacttggtggggaaacctagctcccgtcggctagaattagactaggttgtaaagagaagtaggtcacacgtaggtcagcttaatttagagcagctcacatcactaacttcttcccccatagcaaaaaggactaacacccaaaaaggggttcaatctctctttctggtaaaagcaggaactgaaaccaggaagtgaacacattcaagaaacaactggaaaaaaacccagtggggctggagtttttgtgaatttgcttggaatttcctctaacctccctaggtatagatgaagtgcccaccattggcagggtgcttcacggggtgttccctaatccctgcatgaggctgggaatgtggatcttcatgcttcacctcagagaaatgagaggactgggcaaaatcgttattctcagactctccatgtcagttaccagtaatatattcaaaagacattttgagtgtggcacagaactactagctttttagtcttccaagtgaggacattaaaacataaataaataaacaagttaaaaactagcatgtaccagcagcatcgcttcataaaacaaaggagatgttaagaccaaaaaaaataaaaagtggaaaggaataatctcagaattaaaaatgggatgtcttcaactttattttaactcattattgcagactgacaaaaaatttgttacagaccatttgtaaactctaaacaggaggatctccaactctcccagttctgtaaaatcttgaaaatctccctggataatagaatgataaactatgggattgatcaaatattcaatacagtcggccctgcatatctgtgagtcccacatgtgcagattgaaaatatttgagaaaaaaaactaataaaaaatacaaaataatgcaagttaaaaatatagtataacagttatgtacatagcatttacattgtattaggtattgtaaataatttagaggtggtttaaagtagacaggaggatgtgcataggttatatacaaatactacaccattttacagaagaaacttgggcactctcagattttggtatctgttgggagtcccagaaccaaccctctcatggatattgagggaagactacagtaggagatttaatcaaccattaacacatttgagtaatatgaagctaacgtcatagaaatgtagacacaggtcattagcacaaacgtaatagaattaatccttctgcatttcttttcaatccagggttgtcaggcctggatgctaaggctagtggccgcttgggcacgagagccatggtgtattacatgtccacgaccatcattgctgcagtactgggggtcattctggtcttggctatccatccaggcaatcccaagctcaagaagcagctggggcctgggaagaagaatgatgaagtgtccagcctggatgccttcctggaccttattcgaaatctcttccctgaaaaccttgtccaagcctgctttcaacaggtaacccagagttcagatgttctctcttctccagtcctctaagttatcaaggcgataacttaagagtattttaacagaccaactctgggtagaaattttctaaatatataattatctctgtctaggcccagggattctatgaggtggtttagggcaggatcttgggattggagtctcctggttttaatttttttaaacatccctttttttccagctcacttaatatatttttgctgtgggattgtcctcctttctcccccaccccccccccccgcctctctctctctctctctctctctccctccctctctctctctctctctctccttatatctatctcttcctttcctttttgtgcatgaggctgggaaatgtgtctttgagttgtccatgggcatatttttattagccttgcccacaaccttctagaatacacagtggttctcaaacgtggcagtaaagctaaaccaccaatggcacttttaaaaaaatacaaataccctacacaatcagaatctccaagagatgaatctggagcttgggtagttttttaaattgtggaagtaatacatgcagattatgaaaattttagaaagtatagaagtacacaaagtaaaagttagaagcttctgcttccccttctctagagctacttatgttgagaatgctgtttcctcccctgtatttttcttttgccacttatgcaagtgtgcataatctttaaaagaattcaaccctggctgggcgtggtggctcatgcctataatcccagcacttcgagaggccgaggcagggggatcatttgaggttaggaattcaaaaccagcctggccaacatggtgaaaccccatctctactaaaaatgcaaaaattagccgggtgtggtggcgcatgcctgtaatcccagctactcgggaggccgaggcaagagaattgcttgagcccgggaggcagagattgcagtgagcagagccactgcactccagcctgggagacggagtgacatactgtctcaaaaacaaaaaacaaaaaaacaaaaaaaaagaatttaacccaatggtactccattgttcataaaacgttacatctgactttttcacagaacaatgtttgaacaatgaaaaacattgaacaatgttttaaagtcatctcttctttttttcatgattgcataatatttttaaaggataaattcctagaagtaaaaatgtccttgtcaggacaaggagttttgtattttgagtttgctggctgttgcaaaatggcactacaaaagtatgtagcagtgggtacagattccttagcaatgtatactcttgcttgctgcatacatgcctatacatttttttaaacttgagatttttttaaaacaggtgattctgttgagtggaaccactgagttagctgagtaggccccattcactaccctgttttctagccccaaggccagcataggctagaacacatcccgcacaccccggtttccattaacccaggtagaaactaagctaaaaccaagcagtctaagctaaaacttcagccatttccaagcacagaagaatgagcttaggaaacagtttgcttagaagaaaagtatgtattcctagctgtctccaaaatgtagtccttaaccattgctgagcccagattactctgggttgggatatgttccctggtttcagatactattttagtggaacatgtagcatggacctatattaaaggaaaccattccacgccagggaagttggatgcagaaataaacagaaataagctggagaagaaggtgcttagtgggctccatctgtatagcgtgtttgcccctcagccagcctgctcagaaagatgaactgacttgctttagtgtgagagacacgattgggtgctatccattcttaacattttggaaagagcattctgggatcgcagctgcaggaggctgagctggtagtagattgggggagagtggagcataggagggcctgggaaggacagatttggacacagttctgtgcctggtcatgccatgctctgtgaaaaaaggaaggcaggaccaagaagcaggcaggctcctggagctattgctctggtcttggagtgaacttttgtggagctggccacactcacactcggtgagcgctgtggtggatgggcagtctttgcatgcagctgcccatggcaaaggctgctctctgccattctggaatagagacctgagccattccctgccccacgccagccctgaccccaactttctattgccaaaattcatatgaggactgagccttggtccctcagtaggctcagtatcaaggtccctttggattaggacaacctgaggaagaatggtgtagaatccacctcagggagaggatggttacagattccttaagcctggaaggaaggcactgaagaggacttgaggacaggaaactcttttaaagggacgtggcatttccagagagaaagggtgcgtgagagacatcttctgtgtccatgagtacagctagaagtcatttaaaataacctgtcttgagtggaggaggctccttgaccagagttagaaacagaaatgtaaagaggaagatgagctccccgcagagtggagactgcctcctcccaggcgacagggcctggtttgcccaagttaagtccctgtgtctttgtgagcagagaggtctccagcttgctttctggggcttactttgaaccaaagtgagatttccaagacagtaactggctgtaagatatgaccttacaacgttaaatccagcccagtaatagagaccgcatgggttcttttcctccagaaaattccgtgatctgtgtatgttcactcggccaatacttgtgagcaggacgggctgccaggctctctgctttgtacaaggatgccacggggggaggagacagatgaggaccctgccccaaggagctcacttacattaaaggggagggaggtagaccaaaacaaacatcagggaaacacagaagagacttaaacattaagacaggtgttctctgagggctagaggcaggatgataggctggtggtaactaggggagatatttcagctgagaggataggggatcagaatgagttaggcctacaaagagctggggaaaggagcttctcagtagaggcacagatatgcagaagctgaaaagtacttataatgttcagaaaagaaaaaggaggctgtgtgaggccagtgtggaggtatagtgagtggaggaaggtaaactcagctcaggcatgacttggtgggccaggggaagctaaggatatagatagggttataggtagccacacttacctatagactgtatgcagacaagaagaaagttgagtaggtcagtttatggttttgcaggttttatgatgagacatgatggtggcttagggacagggagactggaattagcacctgctatgctttggatgtctgtcccttccaaaattcatgctgaaatttagttgccattataacaatattgataagtggaccctttgggaggtgattaggccatgaggtctctgctttcatggatgggattaatgctgctataaaagaatgagtttggctcctttgtgcctctctttgcctttctaccttcctccatataatgatgcagcaagaaggctcttgcccgatgctgatatcttcattgtgtacttcccagtctccagaatggtgaaaaaataaatttctgtttatcataaattatccagtcttaggtattctgtcgtagcagcacaaaacagactaaaacagcacttacatggagttgtgcaaccgaacagcttctgtgaatcaggaactcaggcagagaactcggcctgcgttcgtgttcctatctcctcagcttcaacttacatcactggcctttgctatttgaaatctggatttctggagtcaaacataactcatctcgaatcctgcttcagcaactaactagcaagctgcccttgagtcgaagggctactgttgacctaagacgtaatggatgtaaaataggtagcagctggcctcctgcctgatcctgacagccaccattcatttagatccatgagtatttctcttttaaaccaaacgtaggcttctttagcatccttaggataggttgacagttggctttggttcccttttctttcctgggagcatgactctgctgttcacataagcttctcttgtgatcctccctgcattctcttcacaccaatgttgcccagatgaaggggccacattgaggggagaagtgggctgcctgttctcccctcacacagcaggccctaggcttcctctctccctgcacgagtacatgtggccaggctagaacagagagcaccctgcctcacctcagagaacactgacctcccttcccatccattttaaataactggcagttcagcattgcttcctatgggaaccagcacagtaggattgggtccctatagcttaacatacagcacagactgtggaaataactcaatggaggtgaggtcatctgagttgacatcccagttctgcccataactccatgacgtccaacaagtcacttgactttcccgtacatcttcttccgtatctattcggggttcagccatctgttacctactacatgccagcactgacaatctaggattctgcattgagttctattttaatgcccctggaggtggtgttttttaagctcagatgtggatttttatagcactctgcatgtagggtgcctggcacctttaaaaataggaccactgccatggatgtcgaggaatagcgggagaggttccttgtgagtcatctgacagagacacttggggaacattgagaaaggcttggcatcactgctcagaaggagtggctgtcttcccaccttgaatttggatctgaaatataagcaaatgctcctgccatggtggctgctggcagctggcactcttggtgcccagatggagatttccagctgagcctggctctagaaggagcccaaactgaggcagcctgtgatacccctgtccagtggggaccaggtagaggggaaaacaggtggatcatgagttgctgatctgacccctgccaaggcttcctattcttaaccagatccagggcccatcacaactggaaggaccatcacaactggaaggaccatctaactgggtctcacaattgggaagagcatccaagttagacatttcatactgtttctgagctacaatcataggagtgaaagaagacatttatcccccaagtttaagcctgtgtcctattattgactacagtacttatagtacatttgcaaattattttcatacattctatatttatgaaattgtgtcatttgaagcaacatggataagactggcggtcgttatcttaggtgaaataagccaggcacaaaaagacagatattgcatttctcatttatatgtgggagctaaaatatttgaacacatggaaaaatagtggaaaaatagataacagaggctaggaagggtgagtggggggaaaggggaaggacgaagggaagtagcttaaagggtacaaacatacagaaagatagaaggaattcattcaatgtttgatagcagagttggatgactgtacttaaaaaatgcattgtactcagatgttagacaccttaaatgccctgatttgatcatcacacattgtatacattaaaaaatttatcatgtaccccataaatttgcacaaataaaaaattgtgtaattatctgtgattaggacaattgtatctcactgtgtataataaaacaccactttgtaaatatagacatataaaatattctccagttttcataaccttgttttggcatttcttaattattgttaacctgttgggaaccttaaaatatatgagtagccaatctttttttttttcaccttataggccaaatctcagctctatgccttttttccctcactctgttagattcaaacagtgacgaagaaagtcctggttgcaccaccgccggacgaggaggccaacgcaaccagcgctgttgtctctctgttgaacgagactgtgactgaggtgccggaggagactaagatggttatcaagaagggcctggagttcaaggatgggatgaacgtcttaggtaggccagctggtggtccgggattctgcttccctggcaatggctgggctatcctgcactcccttttcagaaaactgatgactcagctgtcctctaggtggagcaggaggctctctctggggagcaatttgagggtcactgggactgagagctgagcgatttaaggaagagagagaagggcagaggagaccataaggggacagggcagcaagaagctgggtatgggaaaaaaggagggagctcaccgtcattgggcacattccctgactctctgtgtggtgttagaaagtcactttctctgactctctgtgttattaagtgacacatccattgctttcgtttcttaagcattttttaaaagctgcccccatgtactggtgctgtgctaggtgcgggggctggaccaccacagcccttagtctgcaaacaaatgcaatgctaccaggattgtaaagtgttggagtaggtaccaagggagctttacagattatcttgttatcttgttttactttctgggatcccagtgagccctttctcctagcccagtaccttcttagcatgccatcctagaggtttttgggctctgcagttgggcagacctgggtttggatccagtatgggccacttactggttatctgaccctgggcaagttactccatttctctgagcctcatttgtaaaatggaaataggattggcatctattttgtagattactgtgaggatgaaatgtgattgtgcatatagggcacagtagcacatgccatgtgctctctccgtatgagctgtgatcattattcaaagtgggtggagagctgaggagttcagtaagaaaatacctccatgagggacagaggtttattaccatgtgagcggctctagtctgcccagtttgctcccctcccactcagtgggtccactcccttccgtaacctccatccatcactagaatggtgtccccgagacaggaaataggggcatttggccaaaacctgggagaaatggtgaatctggatggatgaagtatgtttatttatccaagcacaatttctaaaggtttggatgacagctacttagagatgaatgagctcagtagtcctttcacgttgtcatctgaaagatcacatggccttgtctccttagttgggttgtcagataaaatacagaatgcctggataaatttgaattttagataaaaagcaaatagttttttagtgtaagtcacaaatattgcatgggacataataatactaaaaaaaaagtattcattttttacctgaaattcaaaaagtaattgagtgtcatgtttgtttgtttgttccaaatttggtaagcctactccttagccatctagaatggtagagagaaagaggagagagagggagcagaattgcacagtcactgagaagcagaagcagatcttttttgtttggcttggcaggaagcaggttggatgagtgagagtgagggaagagatgagctgactaggttgctgggcaatggaagatcaataaacattgtttaacaaccagtgggaggtgagaggtggaaggagcgaggagtaggaaggagagttcctctggggagattttgcaaatatccccagcacccaccaccgagcagctcttctccctcactgtccagctatctatgttcctttcaggtccttcctaactcccccatggtcttttctggtgggtcataacttaaaacacccaacccccttttgtcaaagtgttcctcagtcttctccatactcaggaggagcttgaggccatgaacaatggggccagggctttggagtgaatcattcaaagactttcctggttgtttccagagtcttggtggattctgggaagtcacaggacctttggctctactggggagtttcaacacaactcactactctgtaaccccagcggccaagtccaagagggttttgttcagatgcaacacccccgttccagtgagcaatttcaattaggcaatgtttacaaagaaaaattacaagctgaatacggtttccatccaagtgcagatcaaggctctggaaagccaagggaagttagactgttgagaaacttcccatttacaaatcatggctgaaataaggttctttccacggtcttctgagggtggagatagtggcttttttatttgtttgttttgctgtctttctgttttttggctttggaaagtcccgaggattaagcacttgcaataagtgaagatacaaccccagctcttgcctcccacttctttaaggaaccatttctctcctaaaaaacctccagaaacaattctggtctccaccctctcccaactgcttaaatcaactccaactgttcctttaaaaacctatctctcatagatatggccagtttctgctgacactgaatggagctttttttattccagttctttgggaccttgatacctcgggcattttctcttaatttcaaatgaaattaaccaagtaatatgagctattctcagccagaatattcagattgattctctttgacctcccacgtagcagactcctctccatgggcttgagagaaggacttgggaatggcctgaaattgattttgtacattactgcggaactagttccctctgtcctggatctaatcttccctaagcctttgtctttccagaccaataacttacttgtgaagtcatttgtcaagctttctagctgagagcaaaaagaggagatactaaatgtgaagtattagtaaccccaagtgcaagtgatggattctttttgctgaagatagaaaggatccagcaaagggtagttagacaatctgggttgatatgtgcttggtgtaaagaggttagtgggttagatgactagggaaagagtaaagtcaaaggttcagagagaaggaattttgttataagagaatcaaattataatgctaaaatttactgagtatgggttaagactttaggcataactggacaccataggaaactggatataatagggagggactggaaattaggactgccaaattgagcaggttaggtgtggagaagaggaggaaagagaagatggctcatacttcagagtcagagaacaagtcaggtggggaagcaaagtcctgtagccaaggacatagcaacactgatttatagaacatgtaagtagtaagaactgagacctcaagaatggcaatactagatcaggggtcagaggtcagggagcacatggggattggaaattagaaatccagatagcccccaggcagtactggaaacacctgtaagccgcacaatgtgccccagtccctggatgcgttggagtgagactgcaggcctgagcgtgaggtaccgagggagagaatggaagggaccaacaggagtggtaggaagagcaaagccaggcctagccttggaggaactaaagtgtagggcagattcccaggatctcaggcacaggggatgaggtaaagccaacacagaagtaagactcatggttgggtattggagttggtccaagacctagtgcaatgtgatgctgacatgaagagggcagagatgaagctccttaaatctttcctggggttaggattgaccccaaaggctgatgtgaggctggacttagatacaagtcaagaatgtcaagtaaaggaagaaaagagtggagggactaggaactagcaaaatctgacagtgaatctatattctgtctttatgatcctgaaaaaataaataaaattaaaaaagcattctaaccatttcaatcatgaaaataattatgacaaattcataaataacagattacatttaaaaaaactggataaaatggaatttcggattccttattgttttccctttgatttttcagtatttttttctccctgtcattttatgtgtgtagtaataaaaaataattttacatataggattttgtaagagtgaaacataccagccatgcattgatttgggataataccaaaacaagctagatgtaactctagcaaagaatttattggctaattggcctctgctattccaatattggctccaaagtttgtatgataatccccaagtcccaacaggcttttcctcgttaatctgtgtaataaaggaatctgcttacacatgatttcataagtgaggggagggaaaagagagcaccttttagtttggaatgaaaatgaatacattttcttcaaggacctaatgctgcttacagtttaacttgctcatgtggaaagtgttcaagaaatccaaaattatccaggggaaagttacattcagtatcaaatataatgctttgttcttttaatgtctaattcatagggtaaccagcagtgagaacatggctccatacattgggaatggtaaagaatgagggagaaaaagtacattttttgtaatttgtccttctatgtaatgtgattcatccaacaggtctgatagggtttttcattgcttttggcatcgctatggggaagatgggagatcaggccaagctgatggtggatttcttcaacattttgaatgagattgtaatgaagttagtgatcatgatcatgtggtaagtggccttgttcttacttcttagcagtgggttgagaaagccttggggtccccagaggatactggagctctccctgcaggaaaaagttggcatgggctgatcaaatgtctttccagaaagactttgagaaagggatgaaaatatcttttttggagcttcccctagaacaagtgtagacaaattatgccccttgggccaaatctaacctactctctcttttatatggccagcgagttgagaatgggttgtatatttttatgtaactgtcttagttgggttgccataacaaaataccaaagactgagtggcttagaaacaacagaaatttctttcttatggttctggaggctggaagttcaagatcagggtgccagtatggttgggtctgataaggggccttttccaggttgcagaccaacttctcattgtatccacagttagaaagatatttatttatttttatttgaattttattctattgtaatttttttgagacagggtctgactctatcacccagactggagtgcagtggtgtgatcatggctcatcgcaggctcggcctccctcactgtagctcaagtgatcctcccacctcagcccctcaagtagctggaactacaggtgcacactaccatgcccagctaatttttgaaaattttttatagagacgaggatttcactatattacccaggctgatctcaaacttctgggctcaagtgatcttcccacctaggcctcccaaagtgctgggattataggcatgagccacctcgctcagcatgaaaagagattcagaaagctctctggggtctcttttacacagtcattgtctttccatctattataacaaaataccttagactgggtaatttataaacaataggaatttattgctcacccttctggaggctggcaagtccaagatcaaggtactagcagatttggtatctgtggagggcctattcctcgtagttggcacctttgtgtgtgctctcacatggtagaaagggaaaacaggctccctcgagcatcttttattaagagcactaattccattgaagagggcacagccctcatcacctaatcatctcccagatggttcacctcttaacaccactgccctgggaattaagtttcaacataagaatttgggggacatatgaattcaacttatgaattgcagtttttgccattactttcaatgggaaaaaccacagttacttttgcaccaacctaataattaacttgcctaagatgattatagctagggagaggaagagctgtagttcatattggtatcaaaacccttgatgcataagcaggtaggttttttggtttggatcgtctaagcaatattgtttcccctttatttcacatgtgtttatagtcagtgactctgaaatctaggggagcctaggagagcatgagtatctattctctcattgtggaagctctgtcatcttcaatcattggaaacttttggtgtcccatatccatcagacagaaagctttttacttgcatttgtttcagatctctaggatggtcctgtatgtctgcctagaaaaaaataaaaccactcttagaccaagtcatacctgtgttctcttttccacaggaattctgggttacctattccccatctctgcatgttccaggcctacccaccttctttgccaaacttcttctgatccttttccacttttctgtaggtgtctttcgtggaaattccagctgctttttctcttcctccttttcttgtctcccaccccacctcacaagggcaaaaatctgttcttttttatctccacagaaccaaacatggtgatgtgcctgtagtcaattgttactaaaactttaggaacgagtgggatagctgataactccaagatttcagatcaagaagatgctcctcactatttcatgaaccatatttaacagacctggcttgttcagatcattgttttacggtgcttttaaaacacagaaaggatgctagtgaaataacatcatgttctcttttatgattgtactgaaccctcagcttctcaggcaatgctagatttctggatatttctgttgtatgaagatttgggaatatggtggtgttgtaaaatatatatatatatatgtatatatatatacacacacacacacacacagagagagagagagagagagacaaagactcgccctgttgccaggctggagtgcaatggcacgatctcagctcactgcaacctccgcctcccgggttcaagtgatttttctgcctcagccttccaagtagctgggattacaggtgtgcaccaccatgcccggctaattttttgtatctttagtagagatagggtttcaccatgttggccaggctggtcttgaattcctgaccttatgatccgcctgccttggcctcccaaagtactgggattacaggcatgagccaccgcatccaaatgtaaaacatattttttaagtccttcagattcatctgagtctgttgagactttagtacacaatgcagaataagtctcttgcttaaacattaggattttccattgtttcctagaatttctagcagattacgcatctttacgccaaacatgcagcccgtatttctgtaatatgatgccaataacatgggcaatgtatgtgtccttcctatgtccataccaatgtgatttccactaaacccttgcaggaaagggaatcttctaggacatcagatgagtctgtgggatgaagtgtagcctcccttctccccagagatggagggtggtggtatgaattaagaagtttcccattcactgaaaccagaactcctaaatacttattatcatcttgggaggtaaaaagtggttgtgaggcaggaataagaccttagaatgatttctgacagctgtttggttacctcatctaggctcatagtcaggacaatgtcacatgacatgagatgccaattctacacatttctttaattctttcactgcctcgtcagcatcagtatttgctaatgatgtgtgtaaaaaggttctggataaaacagtcaactactctttaactgacccctcaaagcttaaaaaaatcagaattcttttgtattcttttctatgtagcagttataatagtaataatagcagaatgtaacattgaaaagattataataattctttttattattaaattataaattagaattactaacttcttgctgtatgctcagtactatttcggttacagtacaggtactaacccatttattactgaggaaacaattattattaaataacttaaatttaccaaattcctgctaaatacttaatattattccaattgttttacatgcattagctcatttattcttcacaatagtactgaacaaaaataggtgcttttgttaacccatttaccaaatgagaaaactaagcacagaggttgacttgcccagtgttatggagctgtacggaagtgatacctacatcaatttctttttgacttcagactggattgaatccaggatcctcctattgcaagttgtgtgactttaggcaatttagacactctaagccccgatattctggtgtgtaaaatgggataattctagaatccaggccataggttgctgtgagaattaaggctgtgaccaacagtcatgaagcaccttctttgtgctgggaactgtctaagcactttacatggattagtattatagtaatagctgtttgctgttaccaatattatcatcaattcaatccatatcctttgtatctctgtgttcatgaattctttaagaaacctgaaaaccccttaatttttgtatgattttcgtatcctcattttcttaggtagttatttaaaacatttttttcaaaatttgaaaaacttaaacagaaagtaaaatgtttcataatctcacccctataaaaacataaagtgagaagtaaaatctctgcctactcttccaattcctttttccaataaaccaccatccatccacactgttaaataaaaaactattcaatgacacgtgttaaaacacagtaaggcagattttattcaggatcattgcaatgagcacagggaccacagcaacgggattttggagtgggggagagagattgggctcacttgcaagtacaacatgggtaagtgggaatttatagccatggagcaaggtgggggcagtggatgctcgggggtaaggagtattttggctaaaccaaccccacaggattctagctgaaggccacagggtgaccaaacatcgtccaggagaggatgaagaacctgatcagatttgagggtgatcagattttgaggatggaggttcttgctaacctgacttagatgagttttttgctaaaccggattttataaggaaggtttagcaaagagcccagaagaggccagaagaaggttcagacgcctaactgaagtttggtcaaacaaagaatctttgtcaatccatccattttttttttcattcaataaatattctattctgtgcaggcaatgattttaggtactggtgagataatggtgaataagacagagaaaggttctggcccttgtggagcttacattctaggaaagggagagagggaaagccaaaagggagcaaatggtagcaaattgtctttgtagcacttattattaattcgaatagtaataagtgccgtgcaatagcgagagatagtgatgggggtagaagtgatggcccacgtggtgctgtctggaaaggtgacctttaatgaagacctgcagagtgagccaagcaacctggtgaagaactgaggggagaatattccaagaggaagaagtggcagggaaagccttttgagggtcagaacaaaggtctagagaggctgcagtgtggttggtgaaagggggcaaaaggaagtcaagttggagaggtgggcaggaggcagatcctccagggtcctgcaggccaccttgatgggttggaatttcatttccttgcaaaaggaagtctctggaggaataataaacctggaggctatactaactgcttttcactctgtcttgatgaaaagttctaatccacaaatggtaacttttaacaaaaatcactctttgggtagctggaactcctatccctaaatggattgggaaagatgaagatttgtgatactttctgagcacagacagcacctttcagcaactcttggaatgtgtgtttaggtctattgacaagctattggaaacgtgtgggacagaaccagaggtgctccacagcagggctgagaaagtccctcagcttacctccactccaagtgtctgtctcatcatctgtcccaggcctgaaagtcccaaatgaattattccagtgagttaagacctcaaagatcctgaagtagttggagctaaggtaaatggtttccagaaggtcaccaagtaatatctgcgtttcatcagttgcagttaagatttttgtttcttgaaatactggttttcaaacagatcagaattacctggggagcttgtttaaaatataaatgccccaaggccagctccaggacattctgactccataggtatgtggtaagcccagggaatccaggtaagctcaggtaagcccagggtaagccagggaattgttaacaggaagctggtggtttctggcacctggacaccgactgaattctaggtagcttgcctgctgtagatgagtgtgtttgtggagccctgtgaggggcatcttaggctggcaagggctgaaagacaaagtaggtggaggctagaatggatacagtagtaagaaaaagactccacaggccagtcctggatgaatctgtggccctgaaaacagagaacaggaacagcctaagaacagcatgggagccattccctctccccaggctctccagccatgtccttctcatgtggaaaatggaccaacaatcactgggcattatttggcttcagaactctccgtggagccctcagcctctttatgcactttgatttgtggttttgattgctggcttcatctcagaagctttgagtggtggccttgggtgctgggcatttgcccatccttttccatggaatgttattttcaattaggtaattcattgatatggaaacccaggaacccagaagtcccagtttcggagtgaaggcctaagttgtttgttttaaaaatgggtgcagttggtcggccacacctataatcctagtgctctgggaggctgatgtgggaggtttgcttgaggctaggaatttgagaccagctgagcaaaatagtgagacctcctacaaaaataaaaataaacaaaaattagctgagaatggtggcaaacacctgtagtcttagctactcaggaggctgaggtgaaaggattgcttgagcccaggaggtcaaggttacagcaagcaatgatggtgccactgagctccagcctggctaacagagcaagactctgtctcaaaatataaaaataaaataaaaaataaataaaataaaaataggcacaagaaagtaatggccctgaaagacttcatagaacaaacgttcttaccttcttctacttaatgctcatcctattcccagagatcaaggtgtttggattagcaagggcttcttcttgccatatttataaaccctaacacttcactttctggcctttgattaacactctccatttacaatgggagctcatgcttttctcagctggctaagtgccccagaggtaaactgttacctctctctagtccatctgtctgtggcccaaatgcattctccaggagactctatagctagtctttttttggcaaagagccttgaaagcattttctctccattctacaaattgctcgtcccaggagagaaggaaaattgaatggcaccccaaacagcttatatttgtatttttctggacatctttaaagggtgcttggtgcttgggaaagaattgatctcttgttttatgaagataaatgctttttggctttataggaaggttcattctgcttatttacagtctcaatgaatgaagtgctggtccctgagactaccttgataatttataagatgtgactatggacacaccagcagaatataaaatggcgggagagctaagggtttaatgacatgagcacaggtttgtctcagactccctaatgtctagggaagcagtcctcagacttgaccagcctgcaccccacggaaaggaaaagtaggaccttcaggctagattctcatatgggaagagagcagctatgctaatgttagtttaactaatttgtgtcagttacagatcagttccttcaggattaggttcctcttgagagaatatgttgctataaaatcatcttgcaattgggtatcccatgagatgttctagaaagcatcactaactcaggcttactaagcatgagtgatgagaggacatggggtacatgtgtgaaaacagaacctacaaggaatgcctttgtcgggactcagagaattaatggtactgacagagatgcgagaggggtttttagcagcacacatatatgcatgctcaaaaatttaatccccacagcatctccatgaggttggagttagccgctctgagccttgacatacatatctgtaaaatgggaataagccactaaccatggtcacatattaataactaataagtggtgagacgagctccatgtcttatgtagtattcatatatatgtgtctcatctactcttcacattttttctttaatccaggaaagtgtttgctccaggcacaattgcaagtctgtatagatcttacaattacagcatcctttcctgactccctgacccctgctggaagccttatctagggacttcattctccccatagtctttctctcaagtatgttcataatttttaataaggtagcagccttcccataaatattttcatatcagccagaaactgtcacaggctgaacaaattcatgccctaacaacaccattctggataataaaggattttaccaaatatgggaagaatatattcaggttgagagagaaaatagctttcccaagagtgaggaccaaagtagtttccaaactctctataaattaataataagatagaactataacatcagtttatataagataaattggtatacgacaaactgcttatctacaaagagctgtgattattcactaaaaagaagtggcttgtcttggttgggaaaatcccccagttgggagtttcacagacctgagattgttttcatttcctggtttcctggtcttgggctgattatttagcttttcttaacctcagtttctttatttgccacgttgcaataatgacacctagattttcgggttgtggtaagcattaagtgagggaatgggtgtgcagctctcaccatagtgcttaaaacaaaatgaaagtagccagcattattgttagaataagtatggaaaaaagactttcagacttagaagtcataaaaccacttttctctaaatgtacattttggctcagatgatttccttgttctctctctctctctctctgtctctctctcatttcaatatattccctatcttcctaggtaagaacaatgcaaatttacaaattccagtttatagttttctaaaaagctcaaattcccaaatttctaggaaggaactgaggaacacaaatcaaacaagattcccagagacacacctgggtctctcaactttgaacttgatggtaaagataaagatggcaatgcatgtctctcctttattcctagaactcaccttagccacaaaatttgcctttggacttttcatcagagcaggcgccaccagatccacaaaacagattttggttaagggaagtggtccaaagtaaaaaataacatgaacttttctcagcaaaagtctttttttgtacagaagagccaagcgttttcctcagtgtgcggtacagaggaggcccaggttctgaatccctaatgatctcttcaatgctgtttttcccttttgtgtttttcaggtactctcccctgggtatcgcctgcctgatctgtggaaagatcattgcaatcaaggacttagaagtggttgctaggcaactggggatgtacatggtaacagtgatcataggcctcatcatccacgggggcatctttctccccttgatttactttgtagtgaccaggaaaaaccccttctccttttttgctggcattttccaagcttggatcactgccctgggcaccgcttccaggtagagaacaaaagaaatcacctttctctttgctcactcttttgccctctttgccatttctcatttctcaaaaccctcccatcacaaagttcaataagaacacttggcacacattactaagatcttttggaaaaggcgaatgatttgaatttttgtctccttctaggaacttctgagccttctggtgaacatttttgctggtttgcaactatattggaaatacgatctcacattaaatttttcagataaatgcatgctatttgtttgcatgcctaatttgccacttaaatcattagtttagttttagatgttttctaaagggagtgtaacaggatatttttcaataaacatttcacctgtgatttggaaaatgctatcacaaaatattactctttgaagattttggtaaatacattttcaaaagtaggagaagcagcttttacaaagtaaatggtatgttaggtgagactttttctaacaaaattcggccaagtctttgacctcgacacgaacctctaatggattatttttccccagagttaacttggcattgatgaagaatcagttccccctttgttacttagttccagtacctagaaagccaaagaggaccccagagatatgtagagaaaaatcattttttggactatcatcttggactgaatctaacaaaaacaaaccaaaaaatgaacaagaagaaatacataagaaacgtcttacaattaggctgggcgcagtagctcatgcttgtaatcccagcactttgggaggcctcggcaggcggatcacttgaagtcaggagttcgaggccagcctggctaacatggtgaaaccctgtctctactaaaaatacaaaaattagccaggtgcggtggggggcgcctataatcccagctattcggtagtctgtggcaggagaattgcttgaacctaggaggcagaggttgcagtgagctgagattgcatcactgcactctagtctgggtgacaaagtgaggctccatctgaaaaaaaaaaagaaagaaagaaagaaatgccttacaattgagaatttttaagactagtgttttactttcagcttgcaatcattgttttatttctgcacatatgtccttgggtcacaaaactaagactgaatcataaaacaggtggcagggaggcaagcaaattctgaaacccatagctcatcattcaggtccttgttgcagaacctgtgcccatgcaatgctagggaggtgccactgcatgacgcagcagggcctgttgctccacggctactgagcagtcagtcaggtttcccttaagcgacctaacagaccaataatgccaaccacctgggaagccaaataaaacttccatcttgcaaatcaatgaggattcagtgctagtagaaaatggagtttcagacaaagctggaatatatacaatcttaagggtctagattctttacccagtttccgaagatgaaggaaaacacttcaaaatttccttcttgatttataaattttccatgactaagtatctctatccatacagatcttcacttgaagaaaaagagaaaaaaaaaaaaacccaacctggtttaattttatttttgttttctggttataagcctggtatctcatactttatctcataccaggctcataaccagaaaacaaaaataaaataaaatttctgcaggctcaatgtgaaaaagttcaggcagtgaatacaattttgaagaagaaaatgagctttgccaattattctatcacccagtgataactggtcataaccttttaattagtctttagttatatatctttcaagttcttactatgtatgtatatattgttttataaatagttatttttttactggtcaacgtatcataaaagttgtatctattgcaatagactttactaccattttttaaactgcataataatgcactgtatgtactacaatgcaaaccccaccctgtcctagccacagtgatgtatatttaaggcatgtctattaaacagggctgtgacaaacatccttacaaatacatctctgcaaggttgtatgatgatcccctcaggataagtggaatttcagagtcaaatggtatgcacattgacagttttgaagcacattaccagattgctattcagaaaaatgtattattttatgttcccattaactggggtttgagggtgtgcccatccctgcttgcttaccagctctggatattgccagtcactttaatgctttccagtcctattgggtgaaaagtaatctcatgggatatgcatatctttacttctccttcccctcccctttcgcctgccttgtgaattgttcatgaacttggtcattttcctgttgaggtattcgtcccttcctgattgattttcaagctctctttttgtataagaatattagctcatgtgtcacaagttgcaaataatcctcctcttcacttgacatttgtcttaaaaatttactgtgctttttgcctctagaagttttaaatttgtacttagtcaaagctatcaatacttttctttagaatttagaatttagattttgcttaggaatagcttctccaagttaatacaatatgactttttattttcttccaatacctttatggtttagatctttcaactatttcaaaaatattagtattattttcttttgaatgactagaacattatttcagtaactttataagacaaggtgaatcttaaggggatttgcatggcccaaatttgtatttaaatcagagacaaatgctcagattatccaaccaaggctgctaatattagaccaatttcttcccctaactctgtatttcatttgaaaaaaaaaaagtggttttaatctttagttaaaatgtggtttttgcctggatgtggaatttctttttttaaaaggccatgtggcgtgagtcatgtaccgagaattaactgaaggtttctttgccatcatggtcacagagaagaaaaaaaaaaatgtaaaacccagggacagcccacaaaatatccttcctgcctcctcggcccttgtacagaataaagacgttgagggtagttgaacatcttttctcaatggttccagaggctggtgtcagggaggacagagggagtggggtggcctgagactgacctgtcttcagccctccaacttcagtgcagtctgttaaaactaatacttaaaaaacaaaagaagcatttcaaatatctgacagttattattagcaacatttgaaggctgtcatatggccattgaggcaggaaccaaaaaagcaatgtcagcatgtcagcccatccacacaggaaagcttgaaattaaaattctcaagtcctagtttgattgggtgggtgggttttttaagacaaaaagcctgtccagtagagaaatagaggatatttttatacttaccaatcatttttcccagtcgacttaattgtccaaagaccatttgatgacattttggaaaaataaatgcaataataaacataaatgtatgccagcaattcctagtttgattgggtgggtgggttttttaagacaaaaagcctgtccagtagagaaatagaggatatttttatacttaccaatcatttttcccagtcgacttaattgtccaaagaccatttgatgacattttggaaaaatgaatgcaataataaacataaatgtatgccagcaattccagaagtatccttagatttgagaatgcttgcaatcgagaatcctggccaccaaccacaactgagcagtcatctcataccagtcctggtgtcctggcaacccttcgaaagggcccaggaaagggtggggtaagaggaagaaagggacactgacttctcattaagatagcaagctaggtctgatgccatcccctgcatgcaaatgaggccaggctccaactttgccctgggtttgcaagattttagttatgagatgtcccccaacaaacaattcttcttcctaccccagaccaagaaggaggcatgagacagacccctgacttgaaatcacaaagaatgttctggtaagagaaatctggctctcctaaggttgttttaggagctcgtgggccagtggtttgataagatgcacatctcgcatccctagttttagggcttctgattcgttggttctggataggccctggaatcttcatttcatttagcttccctggagcagatggtcttctcccactctttgagaaactaagacctctacagggatctatgtccagtttggtcactaattctgaccagtagaaggaggaaactttgacaaaagctgtaagtgcaagagagaaaacacctccaaatgttatctgcattgcaggttttctaattcactttgctaaagtttgaatagaaaaaaatcaagaggatggaccatgaagcacttccatggcagtttgagtgttctgcattgctttctacattacttaaactttgcagcaaatccactcaccctcccaggcacttctatccacatggaaataatattctggcctttagcaacccttactgtttattggtctccaattttgaagacatatgaacgtgtcaggaattctggccttcgaggcttggtcatgtggtcacgaatccacatcccaggcctgggaggagtgggggtgaagtcccttcatatttagtctttgatttgctaatgagcacatgctttcctgctccatgtcattgaagtgactgtagaattggccgatgagcatatatcagggtgttggactatctgtgaggttccccagtgaattgcttgaagctcaggttcatgctgaagtgtgctggacatgtttgttgttatggaaattagcaagtccagctcaggacaatttcccagggctaaatgcaatccattcagtcattttatcggaaacagcatttctagcatgaaattatgggttattcaaaaattcctcatcccattttgctgttgatagctgattcttttctgacatagctggcttttgtttttttttttttgcaacccaattaatatgggcaatcagatgcacttcaatatcgaatccaaggtggaaacagtggccaaaagaaaaaatcttcaagctctgagtatatctccaaaaccagaaccaatgaaaatattttgctgcctattagtgtcttaataagattgaatttgagcctccaactcacgagtttttaatctggctccagatactgcttttttgcatgtcacattgcttgattgacacaaaacaagaaaaactaaggatgcagtggcattccagtttatgcattgtcctgcttctctaaagtggacataaccctgtctctctctttctctttgttctcagtgctggaactttgcctgtcacctttcgttgcctggaagaaaatctggggattgataagcgtgtgactagattcgtccttcctgttggagcaaccattaacatggatggtacagccctttatgaagcggtagccgccatctttatagcccaaatgaatggtgttgtcctggatggaggacagattgtgactgtaaggtgagaagggtggggtaaaacacaaaacaacctctaccctgtttcccctccacactaactccatgtgacagaggccacttgaatttcatttctgctggtggaagacaatgaaggtaataaaaaaagagaaactattggcagccttcaaaaggaaaagattgtgacaagaaagaagactcttattaatacctcctgtttgtattgcacatgtcaacttgctttagaaattggatattatttgatttttagcaatcctgtgatggaagcagggtaatttctttgcccatttaatagacaaagaaactcaggcaccaagaggcatggtagtttgtccatggctacagcatggctgtaagtgaggccaacatcagtaatgatttggcaggactgtaactgaggccaacatcagctgactctggatccaatttttgtttcactgaaatatgctcccttcaatattccatcaccagagggtaatggcagaaattacaaaatactggaagagattcctcaatatgacatataagattttattacaaataaatagcacatagttttgtttttactaaagctatttttatttaaatgtattcatcattttaaaaattcagaaagaacattttcctaagagattgttaaaaatgcattgcctcaccataaacttaaagatcacacctactagccaagccaacactctgtttcttgcttataggttaagtcattgaaaatatcagtcttcagcccattcaatgttatattgacattacagcatgaaataaagctttttgcaatcatctttttaatattatcactcccaacccatctaaatgcttcaattaagccagaagccaatttctgccttatgtcatatccctactctcagtctcaatttcctcatctataaataaggaaggtattcataatttggggctaaaagttggtagttcatggatggactcccagcccagagtgttgctttgtttgccttgaaatatattgtaaaagattagaatttcatcctcttatgagacagctgcccttcagtttcccacagtctcccctgctccctattacttatgcctggcctgctgcacctgtcaccacagcttagccctttaagacaacggagtttgtcaatcttggactcaacaatttataagttttatttcccctctcagattctatgtgatcagaaaacatagggagtaagtgggtaacattctgtgtgacagatgtacttgtagtagaaagagaattccagatattagaacagccaaggcctgggtgattcactttaggaaatgaatgaggtagacactggaatacactttcatcctccatgatgataatcactccactctttggttcctctgagatggcggactctttccatacattgctttgaacatgaccagcagtcctgaagagaaggaatagtcattattcccattttacagaggaggcatgtgaggctcaaagaaattatctgacaaacctaggtctcatggctatgggtgccagaggcacaagtcaaatttctattccacagtttacctcttccaaccacaggtcatttcttctttctgactgtgactcaaaaaaagacattagaatagtgtttttattgactttttccattgggcattagaaggggcaatagtttttgggttcaggctaaggcactagcctctttctcccacttcaaaccccgggcagcactgtcaatctctatattagaaactttggtaataatctggtgtctgcttggttcatgttattcaacagcccattctctggtaggcctttagtgggctaaggccattttaggagatctctcctaagaggcagtgttcatttgggtctgatgtctctacatgctcaggctttttaaaagtccaagctcagggaccacccagtgtctgtagcagtgctggaaatttgctctaatcatgtcctctatgtgttctaggggctgatattgccatggaatggccacttcagagcctttgcttgatctatctagctctgaggtattcaaccagctcaaggacatttttgttaaaacacagctttctcctctctccttctaaccattccagaagatttagtgaatatcccatatgcatctgagttcactttagcaactcagtcagcaaatagagaaaagaaaaaattcaccatgtttaatacacacacacacacacacacacacaatatgaaaacatgaaataacaatcacatttatttaatcagctagaatgtatcatctgaaatgtctcccagtggttctcttgctaaattatctcaccttatacatagataaggaaacagaggctcagagaatagatcacacacagccgtctagaggaacaactataatttaagtttccaaatgctggcatatgcttccatttatttaacttgtgatcctagaaacagccctacaaagtagatattgggttctatattttacagatggagaaaatgaggcacagtaagttgaggtaactgggccagaatcatgctgtttgtaacaggcagaaatgggatttgaacccaggccaccttactctggggtttgtgtttttaaccattacacacactgcctccactatactatactgttgggttgcaaaataataatttatatatatatatatatatatataataaaatcttcacaaccaccctatgaattatatactataagggagcctcagtttcctcatctgcgtaatgggaacaataacaaattctagggtggctgagaacatggtgcctggcttatagtctcttatgagtatgagccaggcaccagtcaataaatgttagcttctattattattattgatgtctaataaaatacacaatactcctagaatattaaagaaaaatgtggctgtgacatcatgagtaccatgatgttactgacaatggaaaatatacttcaggtcagaagatcaagcctttcaaaattatgtcctaacagatatcacgagactactaacctcccttgctttaaaactcaaagatgaaaagggcttcttaagcaagtcttttgccaagcaaaggtaatttctggtatctcgactcttggtcttgatggtaaccatattttccattaagttcccactattagatgggaacttacagatgggagaatggaccagtgagtgattgaatttgtgcttaaattctataaatttatctacacagggtttgttttatattaactgatactactgagcattttcacttgacaaaagatgagtttgaccatatgcatttaaatctctggcccctgggtgggttcagtcaaatcctcctaaattgtagacaccacaagggctacctctggggcacccaccacgggtgtatatacttcatgcctgcagtttgtttggaggaaaatagccaaatctatcttcaggctgcgcttccaagtaaaattttcatttctctcctttcactgcatgtaggaaaatagtgattagaaattcttagcatttttattaattcatagaattttcagtgtagggagggatcaaggccatcaaggacaagtgtggcattgaaatcaagcagaccagtgttcaaatcccagcagaccatgttcaagctgtgtgacctaagtttctccacccatcctatctgtgttttcctcacggtgaaagcaggtgttaccatatatgtcccttgcagggttactgtgaggttctgctctgatattgtgtgtctagtatcttaacagcttccaggaaccctagagaagtgagccaggggagtggaaggccaggcaaagcagaaggcaatgagggatgcagggaaaatcactgcccaagaagctcttgcagggcttagaattccacacacagagacagtgcctaccggagggtgagggtattattagggacaagaggggaaagcaacttccaggaagaattatctttctaagactttgtctcacacaaccaaaggataaccagataatgttaatgttaaccacagtgcaaagggatgtgcaagagtgactcagagcaactgatgctgtgtataaaacagtcaaggtcaagactgttggaacttggggagttccccttccctggtgttctgtctgtttgggaaacagttgagaattcccatcttccagctttcagggctttagggaagttttcattgcaaagcagcctggtcctgtccagatttcttgataagaaaaacaattcacattcactgggcatggtgggggtgggggagttgcaatgtgcccagcctcttgtaagtgcattttaatttattagctcctgaaagcttctgaccaccccatgagagagataccattactatctcctttttacagatgaggaagtcaaggcacagggaggttaagttgcctgtagtcatgtggttaagtggcagagctggaatttgaactcaggttgttcaactgcagaactttcacggctgagcactccacactgtacctcctgtgacccagatggattcaaggaaattggagtgctctgagccttgacaccatggacggggaggggaagggtgtggttggggggtctgtagatcacacccagggcaagtgtctatgcaaggatgggcctaaacctgggaatgatggcaataggggaaaaaacagctcaaaccacaggctctccaggggccttaatcttccaaacgtaagattaggtatattcagcaataagaccccaggattctgtgcttggtcaactgatggcctggatttagttgaaacaatttgagaggctgcctctcagctcataaaatttctagtattttataactacaaagaaagcagtcccccttaccttttggcacccacaaaaacaacttgggaatccatatttccaaagtactcttggatattttgatatgacattttgatatgacagctttgtacaaatggcatctagaaaagaggaaaaagagtcactgccctttgccagaccacagagactccctggtgtcaggacagggcacttgaactccagattaaccctctcccagagacaaacttcaaaatggtgctgggtgtggccctggcattgcttggaaagaactgatgagatgcttcagaaagaaagccttcctttctttcattatcatttcttggcatcccctttctgaataatgtattttccagcccatggtgaggcatccaggcgcctgacgcttagtgtcatttggaatctgttgatttgtttccctgatgtccaactcagttgggtctggatatttgctattctgagttctcatgttaaccttggcaatggccttcttagacccttgccacatagtccaaaagcctctggtgctcacagagacataaaagcgtaagcagaaatgaatgcagttgtgttcccatgggaggattaagggtgatttgtttttatctttaatatttccttgcctgcttttagagccacgcttgccttatttgagccctgtgatatattagactaaccggatagcatcatgggaataaggctccagtccatgaatttataagcttacatcatagttgagcagtacccaaataggccttaatccttaattccttggtcttagtactttagatttctctattccttggtggagagtatggggtgggggttgggggatgaattttatggctgcaggaaaattagagcttaaaattgccagggttggttttgctaagattctttccatttccatgacctgaacttctctgttctcatagcctcacagccaccctggcaagcgtcggcgcggccagtatccccagtgccgggctggtcaccatgctcctcattctgacagccgtgggcctgccaacagaggacatcagcctgctggtggctgtggactggctgctgtaagtgtctgtggatggggttctgctgggactgtgagtactgcctcctagggatgcacaggtggcaaggttgcaaccaagatcttagctaatccccatggcaactccctcactcttccttcctccttcccgctcacatttactgaggacctatttgagaaccaaagaagaaaaagatgaaatatttgaaggcgtcacagtctagtggaggaatcagagagattatgacacaaggttaaaagtacagtaataaggaaccagctactgatgcattcaaagaatctcagaacattatattgaatgaatagagccagaaacaaaggagtatgtactgtatgattccatttatatgaagctctaagaaaagacgatgtaccacatatcaatagaaagagatcagttggggctgggtgcggtggctcatgcctgtaatcccagcacttgtggaggccgaggcaggtggatcatctgaggttaggagttcaagaccagcctggccaacatggtgagaccccatctctactaaaaatacaaaaaattagctgggcgtggtggcatgtgcctataatcccaactactcaagaggcggaggcaggagaattgcttaaactcgggaggcggaggtcgcagtgagctgagactgtgccactgccctctagcctaggggacagagtgcgactctgcctaagaaaaaaaaagaaaaaagaaagagattagtggtttcttgggccaggtatagggggatagagattaactgggaaggaacacaaggaaacctttgggagtgacagaaatgttccatatgcacaggtatgcacaggtgtctacatttgtcaaaactcttcaaaacacacacttaaaatgggtacgttttgttgtatgtaaattatgcttcagtaaagtgattaaaacacagcacacacataaaagcatagtgatagagagaggccttcatcccagtcaagaatggaaggacagagcggagaatatcaagaaacatgaaagtggttactgaatttgagtgttcactaggttccagctactagactgagcactttacatcttcctctttaacaaccttgaaagttaaatgttattattcccactttatagatgaggacactgaggtttatagaggtaaagagacttagaaatggacagatattcgaccctaggtcaggctgcctctggagcctgacaaattcttgtttatggtcacattcaagcttctaaaggcagtggtagctgagctgaatcataaccaataggtaaaagtttctcaggtgtatgtagggagacggggagacaggacattccagtcaaggccagcctgcacaaaggcactgaggctaccagcagtgtgaggatgtacaagtggtctggtactcttggaggcagggcgtggtgaaaggtgagcaagacggacatcctcaaaggccatgcagagaaacttgaacttgaccatgtatggtagttcagctacctttcccagtgaaggacattttcctcatgtagaatactcactgcccattcacaaaggtgggaaagtctaaccagatggtcttcgacaagggggttggaatggatcccctctaagtgcccacttgggcttggatgttctgtgagatgtaatctgatgcctcctgtccagcactggagttaaatgatagggcctccggcaatgccagtcttcaatgtcagaggcacagagtgacaagtgctggcccagagtcccaaggccaaagtgcccacacttatttttcaaactgcctgacttgccagtagcaaattttctgacatttattggcattgattttaagagccagaaaccacatttttcttttttttcagatggagtcttgctctgttgcccaggatggagtgcagtggtgcgatcttggctcactgcaacctctgcctcctgggttcaagcatttctccggcctcagcctcctaagtagctgggactacaggcatgtgccaccacacccggctaatttttgtatttttagtagagacagggtttcactatgttggtcaggctggtctcaaactcctgacctcaagtgatcggcccacctcagcctcccacagtgctgagattacacgggtgagccactgtgcccagcctcagaagccacattttgtggacttgagtctgtttctgcttcccactcccacccttccaaagagaggaaaatgcaagtggccgaagggaggaaggacagctgggaaggctagaaagaagcctgacttctccataagatgtgcctgctgttggtgcagacaacagggcttaggttagaaataagaagtgcccagcactttgggaggctgaagcgggcagatcacctgaggtcgggagttcaagaccagcctgaacaacatggagaaaccccgtctctaccaaaaatgcaaaaataattagccaggtgtggtggcatatgcccgtaatcccagctacttgggaggctaaggcaggagaatcacttgaacctgggaggcggaggttgcagtgagctgagatcgtgccattgcactccagcctgggcaacaagagtgaaactccatctaaaaaaaaaaaaaaaaaaaacaaaaaaaaacagaagtaagaagtggctccctgaacagaatcagttcaacttgggagggctgcaaggaaggccatagattttcctgattggctccttcatcatcagaaaatgctcaggaaatacctttagcggaaggtgacaagcaaacaaaatagcctcatctctgtctctgccagtctctcaggtggtggtagtggcgtccctacctgctagcttggttattctctgtgtcctatattggccccaagggacagcctttctcatgacatctgttcagacaaggcagctgagagtcaatggtggtgtatgggtgagaaggattgtgagagaaggggatgaaggatacaaaggaatggggtaggccatggatggaagggggacaaaagggaaataaagacattggcagtggtctagagacagagcaaatagtagcagctcaataaatgtgagctactcttaaccacatagttgctgtgtgataattgggtccatccacatgaaaagaaagacgaaggaagccatttaagttctgctggctttccccatgacttgttgcttacttaaacccttgactctttgcctctcaagtcttttcaatgcttgtggtcattgagggtccctcgcctgctgtgacaatattgcctcatttttttcttgggcttatttccaaggctttaaaccaccattagaaattcatctttttaaaaaatattattatagaggctgccccccattataatacaaatgcctttgagtggaaaaaaatgcactaatatgatcaggagtgaggaaaaggggtgatatttggtgggtactgcaatgtctttacatctgtctccatttaatccttaaggtgccctatgctgtatttccagatgagaaaactgggaatcagaagggttgagtcttttgcctgatgcacagcagagcttgtatggccaggtcaggacacttcacccaactccacacagcctcctaatttgtactaagtgttctaacagtggggaggaggagcagagaggcccagagttggaacggttggagaagacacacttattagggccacccactgggctatggtttgaatatttgtccagtccaaaactcatgttgacgtttaattgccattgtaacaatattaagaggtgtggcctttaaaaggtgattatatcgtgaaggctccaccctcatgagtggggttggtgcattataaaagggtgaattcagccccttcttgccctctctttgtctttctgccttctgctatgtcatgatgcagaaagaaggcccttaccagataccagtttcttgatcttggatttcccaacctccagaattctgaggaaataaatttctgttctatataaattacccaatctcaagtattttgctatagcagcacagactaagacacacctgattctgcatgctaaccagagaaatatttttgacctatttttttcttctctcagcatgaaaataaaacaaataggctcaatgaggacaaatggggtacaatcaaggtcttggccacccttagaattcaagtcttccagccccagtgggtctgccattgtaggtcctggtccttggcagtcacttgttttcaagcctgttggatgtgagtcacttcatgaaacattcaaaaccctgcctacttctgacctaaatgttagcaaatgaaacaggagggctgggccctcccagatcaccccatgcaggtgctcacatgcttacacttgcaaaggaaagcagagcgtcctaactccagggctgaagtgtgtcagcagaagggagttggctgaatttttttttttttttaaaaaggatgatacatttggattaactatgttgatgaaatcatataatagaaaaccccatcctaggctggagctgggaagaaaggagcaaatgaagagctgttgtccagttctggggctctgatctcaaatggagggaggagtgtgatcaagggaaagagagtctaagaggcaggagccctcagtctgagctctgcacttactatctaaaggaccttgggcaagtgactttctgagcctcagctacatcatgtgtaaaatggggcaataacatatcaggttggaagcaagagtctaggttcaatgcctttgagtgcccttctagttttaagacctagagtagaattctgctggggatgaatgtttgtatacaaataagcacgagcattccttttaagaggaaaagaaaaaggaagggtagaggatcctgggaaaatgtgtgtagctgtttgtagctaggtcagatctgctttgaattagtaatggtggcacattctttctcaccagcaagaggagttctggaaactagctcttggttgtgagctctgtgactattgggtgctcattagtgtgtaagtggtggtgggggctaagatgagatggggtgcaactggccattccctagataagtagtctgtggaggaaaagcagagaaaaagaaaagggggaaacttcacctctttagccaaggtttgtaagctttcataactctagcaatttttcaatttaaaaccaaacaaagcctacagtgacatttaatgtgtcacagtgtttgccaactgctggagaccagccagcctcattactgccctctaagccctggatggttttcaacaggcaggcttagctgctctgtaaatgtcatggtgaaaaccaagattctggagccctgaaaaatgccgagtcccagagcactggatgggtgggactgtttaaaaccagaaccttcccctgggtccaggaagccctttgcgtcaggagcccttggcagatatttataagagaccttgctgacaccccagtgtctctgaaggaggcaggatggagtggtaaatgggagccaataccaggaagaggtaataaataactgtgtctggctacaggtaggaaaaggaaaatcaaaataaagtgaaatccgagtggacctatggcctaattctcacataagactctgctagtgagatcttttctgggctcacatgtgctaattggggaatatagttgagacggcacttagaaggaagacctcaaagagcctccaccctccaggagggctctgaagctcctcccaacagcattcctctctggagagaatagagcattcattctcaaactcgagcatgcaccaaaatctcccagagatatatctgaggtggggctggagaattgacatttctagcaagttcccaggtgattctgatgatgcaatctccagggactctcccttccagaagcaatgaactagagacggagaaggaaaacaggagtttctgattgtgggtatatgagcacctctacttttttttgagttaactcttgacagttgatgcatcctttcaaaaaaatagattgaaaagatacaggatgcaaatagctaatacttagtgagtgctccttaagtgttagatattgttctaagcactttacatgggctcgtttgaaagtcacagcagattatgaagcaactaatagtattatcattgttttacagttgagaaaacaggttcagagagaagtaacttatcccaatttagtggatattaactggctgaattggggttcaaacccagatgatctagatatccttgggtgttccaagcatgctcatctgagttctgctgttttaaaaatttgagacacacacatgcacatgcacacacacacacacacaaacttaactaactgaccctccactcatggctggtggaaaacaaaactaattcctacgttaaccttttctttgaagattttaggggcttatgtctatcttagtcttttgctttgatttcccacttccactgaattctcttttttacatcttatctccggtctacatcaacctccccatggaatgtggccccttttccactaagtcctttcctctctcaccaaagtttctctgacttgaggcagcataattgcagatcaaggcgggatggggcagggctatagttctgcgcagcaaaatcattttttgatatatcacaaaataaatgcatgttcatagcaaagggaaggacaaagttcaaaagagtaataaaatgaaaaagaagtcgtctccccttcatcgactgttgaatctcaagtgttatttcactgttaataatttcaggtagcacagacataaaataaaaatgtaatgttaggcatctccttttctaaaaaatcttttagtattccccacccctgggaatttccccttgggactccttgttctccatctttgaatatttccccagctctctggacacccctctccttttcatctgtaaagtaatctgagctctctgtgcctctctcctcatcctgctagatcatggcctgcatcctgactttttaccacgaaaatatctaaccagatgttttactaaacaaaaaccaattgtgtctctagagctaatctgctttcaagtcttaaattcacaatccatcctggtcctgccccttccacataccagcctccccattctcccctgcccagcctgtgccataagtaaatgaaacatagtctcagtcctcaaggagcttatagtctagtaatggggtcaagaaatcccaatggagcctcctaggtgcaaaaagaaatggataaggtgtagggaggaataaaagagaaaatgctctgatccccttttcacctggactaaaaatggtaatataatgagaagcttcttctgggtcatataagccttttatataaaacagccttggtggaggacctcttggttgacaagcactcaatacatgttagcagttattatcttctcaacatgcttgcaggtgagtatccctctccatatgttacgaatgagaaagctgagcaggacaggctaagaaatctttaatgcttgagctgggagtgtcatccaggctggtatccggacttcacgctcttagccaatgcttacgtggatctccttttcttccctaaccccatgtgactttagcccttgaatgcccagagctgtgccagccttcctcgggtttggggcctcaagtgacccctcttccacaccctgcccctaaagacagtcccttcgcaccatgcatcctgagaggcaggtgctatgttttgtttctatcaatattaagttgaaccatatgaaattgccaatatttgacctttttatatggaaataaatggcaatttcatatggttcaatccaatgcaagacaccagatgaattgtgggtgacagctccctcagccctgttcttctctgtgaaccaggagttccagacgatttcacatttccctgttggaggatttagactgagagatgaagatgagagagagtaccttggtacttgtttttctttcagtgaaccagacccagtgactcagtgtgaagtaactcggtcaagcccctctctcatttttggttcctggtgacctctaaagcatagccgtgtcatctgtagaaaacccatgaaatgcaagatctgctttcatcttcatccccttcttgcagtcctgacacacagcgtccagacccaaagatggtgtcacacactctaaaagttgtcttttaccaagccttaaagctcttgagggcaacgcgaaagacagggtttcctgagtggtgagggatgattgtgagagaaaatgaaactctgcctgtgaagaaactttccacacatgaaccacaaactcccatgtcctgccttgggccccagttaaacttccccagagttggtcagacattcccctggcagcctcaagggtgttctgccttgcagcattttcagaaaggaagacccatgcagagcagccatgacctacctcctggctgggcatcctgggaatcttcccagaatgccttgtggcagagaaacctggcatgagagggctctgtattctagtttaatccaaattgacagctttctgtttaacagatcccctttaacgtcctgccttctcacttagaaacctattttcataatcttaccttttactccttcccttctgtattgatggaatacagtccctccaccaaaggaaatggcctttatctccactctggacttccatcctctctgatctctctaggaacctaacttcatcaattattccctcttctctgtatcttcagttacttcttccccaccaacctcttctcattttgatttaaacatgttcaaatattctacctcttaaaacaaaacacaaatttgatctcctttccatttccatctgccatttcctctccttcctttctcaatcaatcatcttgaataagctgattatacataatgtctccatttcttcacttcactttccattttttacctatagtgagctggcttctatcactacctctgtattgaaactgctcttgccaggccaatagtgacctctttgttgttaaaaccaaaagaatcttcttttttaagatggagtctcgctctgttgcccaggctggagtgcagtggcgctatcatggctcactgcaaccttcgtctctcaggcccaagcgattctcccacctcagcctccagagcagctgggattacaggtgcacgacaccacacccggctaattttttgcatttttagtagagatggggtttcaccgtgctggccaggctgatctcaaacacctgacctcatgatccacccacctcagcctcccagagaaacgtcttaccctcatctcacctgatccctagataataattagggttgtttgccatacccttattttgaagcatacttccatttacttacaaaatgacaaactcttctagtttcctttaacttttgcaggctcttatcttgcccattcattaaaagttggttgaccttagtgttccagcctagactgtctgctttttacactctgcattctctccaagggttaattaagcacctcggtggcatcctcagccttctctatgggatgagtcctattatcacctgcatcacagatgtgtctcctgaccatcagtctatattaccagccatctgtggggcatctgctcataactgagtcacatgcttcaccctcaacgtgtccaaaccaaagccagaatctttcccgctccaactgaccatgctccctacatatggttacattgtctactggttgcccaaaccagaaacctgagaggaatctttgactcttttttattccctataaccaatcagtcttcaagtcctataattctgtctcctgagtcttgctcaaatccatctttctccaaacccatcatatcctcactaactggatttcactctttcaggcttatgattttttagttcgttcttcacaatggaacaaacatgatcttttctttcaatggctcttcattacacttgagataaagactaactcctgaacttggctgataaggccatacatgatttggttaattcttactttctgcgtctctcactatacttgttagccatcctgaattcatctaagtgttcctacctcttagatttcatgcatattatttctttcctctctctatctcattttcttggacttatccttagggcccaactcaagacacttctacttaaagcttttcttatgacccaagtgtgatagtgttctacctacatgaccctgtagcactctgtactcatttctttttgaacatttatctcactctagtggaggaggtagacaaataaacagtacgtgggttcttggggaaaagggagtttaagaaggatttttgctgcctaagcaattggcatagtgcccttacacactctaagatgcttattaaacatctgttgaataaataaattcactaacaaagaactcaaactattagagttgatgttttcttctttctacttagctattaacaggtgtaagaaaaggaacattttcttgctcatgtatgcctgtaacctacaatgagtacttaaaggatgtctagtatttctcttattccgcttagtacaacctcctgtgaggttgggattagcctcattcccttgctcaggtgaaaagttatttgctcaaatgggaatcagaagccctgggttagtgttctcacccaaggtccagggccctttgcatcttgattttgcatcaaaagaataaaagcatcaatctgcttttattgttttttaaaaattcattttaaaatattctttcattcatttttgagacagagtcttgctctatggcccaggctggagtgcaatggcacaatcttgactcactgcagcctctgcctaccgggctcaaacgattctcctatctcagcctcccgagtagctgggattacaggcgtgcaccaccacgcctggctaatttttgtatttttagtagagactgggtttagtagagaccagggtggtcttgcactcctgacctcaagtaatccacccacctcagcctcccaaagtgctgggattgcaggcgtgagccactgcatccggccagtctgcttttattctatacaactctgtcttccatccattcctgtcttaatggctatttcattggccagagttctttttcaaattcaaggagatttgatggcatggaagagatgtggtggtaaaaagaaaaaatgtggggaaaacttactcagaaatcctattccaaaaacttggctgcttcagtggctgcttctggagagcaaggatttggtgtcaagggttgaagaagcagtcgtttgtaaacttatgtcaaccacttgagtggaaatggatgtgttaaactggaaaagtcattaaccctttagcataatattttgtgcttttgttcataacatggtgtgtgagtggagttatccccaaaaacggtaggacccagcacataatgagtgtcaaccataggctaggaactgaatttgtcttccccaaattctacaaaatattaatagttattttggctacatgagaaaaattatggttgagaaagtgtcttagtccattcagactgctataacaaaatactatagaccaggtaggtggcgtataaacagcaaaaatttatttcttacagttctgtggaggcttgaaagtccaagatcaaggcactgggagattctgtgtctggtgagggcctgcttcctcatagacagctatcttttcactctgcctcacatggtagaagggccaaggagtctctattgggcctcttttctgaggtcactgatcccattcatgaaggctccacccttgtgacctaatcacctcccaatggtcccatctccaaataccatcaccttggagatgattaggtttcgtcatatgaattttggggggatgcaaacgttcagatcacagcagtaagtcatccagatcacacagttagtaggtggctgagctagattcaaaatcagggctgtgtggttccagggtgcttctcaacatgtggcagatggtggattctggaatggtaccgcctgtgttcacatttgctgtatgactttactaggatgtcagactttgggaagccactaatctctccaggccttagttctgtcatctagtaaatacgaataatattacctcttcagagttacagtgagggttaataaggtagtatctataaagtatattctttgttttcttttctttctttctttttttttttttgaggcagagtcttgctcttgcccagactggagtgtagtggcaccatctcggctcactgcaacctctgcctccccagttcaagtgattctcccatcccagcctcctgagtatctgggattataggtgcacaccaccatgcccggctaattttgtatttttagtactgtattgttaaccaggctggtctcaaatgcctgacctcaggtgatccgcccacctcagcctcccaaagtgctgcgattacaggcatgagccgccatgcccagcctataaactatattcttatacatagtaagtgtgatataaatttaactgtcatcatcattatcactaccaccaccaccattacctttggtgtctttctttgccaataatgcaaattattctgggttatgagatcaatgggtactcagagtattgctctgaaagacctcagcattctttggaattttgcaattggtcaaaggtattgtatatgtaaactaaaaagtatctgagtcaggtctcaatcaatttagaagtttatttttccaaggttaaagacatgcccagaagaaaaaaacatggaatcacagaaacagtctgtagcctgtacttttctccaaagatgattttgagggcttccatatttaaaggggaaatgcagactggagggaaaagagggagagtctggtcactttactgaatccacatgttgccagggaaaagaagctggtagggcaatagacaattatgtatttatcttgtgctcagtaaatcagcactttacataagataaggtgaatatagagtagctacctgtggagatatttaactattagctatctgcttaggaacagaaggagaggcagtttcttgcatgattcaactttcagcttttttttttttccccatttgacatagtaaattgggggctggagattttactttcctttcacagatatatgactcaggatacattccaggagggattgaaagtatagtggagtagctccaaagtagaccacaactgtataacggacaaataggtcagctagttagttgggagcgttgccataggaattgttgtgctattaaatagggttaatgttttcagggggagatagtagcttaactagccatatttggatgatctacctagaagttgccacaaatatatttgaattgacttgatacaatttataataatattaaaattatacatcatagaataaataatttttttgagttcttattaaatgtccggaagcatgtaagcactttgttatcttatttaatcttcacaacaaccttatgtattggagatttttattattttcattttataaacgaggcaactaaggctctcaaatgtcaagtatgatcagggttgtcaaacagccaagggacaaattggcatttgaatccaaatcaggctgcctctaaagttcgtgctttttcttaactactatcatgtattccttcctaaacccacgtactggggcttcttagcaattattccaagtgcccgattttgtggatgacctcaagacgcagtcttcactcagatgtagacccgatcacactgaggcagattctccaaagcagaagaggcgcaagagcattctcagatggagagatgcccctgagagttaaactccagctctgatcatatttttttccacattttcttcttagttgaaattagaaagaccaccagcttataccttgcaaacaactggccttgcaaaggagccaggcccgacttttcctagtgcagcttccttattattctctaataagaaatagatttgataatagcaactagaattcatttagagtctttgttccaagaacaaattaaagtttccgctttgcctggaactcatattatttgaattgaaagctaaaatgtcctggactaagactgtctcagcagcatctttatgtaaactccttcattttaatttttttaacttttttttgtggttttccagcatccttccttttaagactttgaatatctagtaaacatggccaaaagtattcttcacactgatttggcttgaacttatggatgagaggagaaaacttactcttaagaatttaattagctttcctggcactgaatttctaagagagttatcaaccattcttttttcaagtcaaaacttgcaactcaagacggggagaaggattttcttaacatttcctgattccagaaacattctggaagatttatttttttaggttaatagagcaagataaagtattttgtttttttcaggacaagtagtcataacacatattggtcaatgagaaaattatggctggatttcttatctaacagctgcgtctgtgtgtgagggaagcaggtgcagggagaaaggaagggttagttcctattcttacaaaaagaatgacttttctactatgagaaagttcacagatggtaagtttttcagtaaaacaaataagtaagataagcagagatagtgtagagtcttcaaaaacacaacagtttaaatcaggaggggttgctgtactcagctaggtgtgtctggagcctgtgtactagttctgatttggacacattatttttctttaatcttttctttcctcctcctccttttcctttgctactggttattggtgtttaccatttgccagacattttactaagcactttacatacgttatctcactgaattttcacacggcctatgagagaagtataagcatcacctccaactgacaaacaaggaagtcaaggctcatgaaagttaagtaacttgccccaaatcaggcagagggaaaaggtagagccagtactcaaccctatgtctctctgactccagaccttgacctctcaactaccacataatactgcttcctcactgaaccttttctgttctttgtccccagggacaggatgagaacttcagtcaatgttgtgggtgactcttttggggctgggatagtctatcacctctccaagtctgagctggataccattgactcccagcatcgagtgcatgaagatattgaaatgaccaagactcaatccatttatgatgacatgaagaaccacagggaaagcaactctaatcaatgtgtctatgctgcacacaactctgtcatagtagatgaatgcaaggtacatttcccattcatggatatcgagacttgtatatagtagtgcatgcttgatttctttaaaaaaaaaaaaaccgtaaagccctgcatgtattattgtcacatttattttcctaaagaatcatgtaacccaagcttctgtgagtcccagatcatctaattctgtgtctaacatggcaggaaatcaacaagtctgatggagaaagagtcaatcagttgcttatttcgtccatgtgatgtgaaacaaccattcgggttcccctatctaccccatttaactaatttgaccagttgtcttgaatatttcgcccaagaatttgtggttactaggccgaggcgggcagatcacgaggtcaggagatcaagaccatcctggctaacaaggtgaaaccctgtctctactaaaaatacaaaaaattagccaggtgtggtggcgggcgccctcctgctagtcaggaggctgaggtgggagaatggcgtgaacccgggaggcagagcttgcattgagccgagattgcgccaccgcactccagcctgggcgacagaacaagactccatctcaaaaaaaaaaaaaaaaaagaatttgtggctactgattttcaaatattttattcctcaaattaaacatcaagagaaatccccagcatcatctgatgtacctagcacaagtagtcctccttgctatatatcatatattggtcaaaaatgtgccaacttaactttacacaactatctttttcttatttgtgtgggaaaggtgaattttgacctgagagtaccttgctccaaaagtgggtaaacaatttcaagtaaagaacagctatccttcaggacaattatccagaaatgtctttttaaaaacactacatctcagacaatgcctggctgtgccatctttctgcagcatggatgttctgggctctcctccaagctgttgggtgctaattcttcaagcttgatgggctctgtctagccttcattgtaactaatttgacattgtcaaagtcagagtgtcatgaccagagtaaagcaaacttggagaaaccctggcaggtgagcagaatcaactctgggggttggtttctaaaatgattccacacagcagctgaggacaagctgaacccagccagagatctctggtagctttttgacttctgttgacaaggtcacatttaatcactaatttcttcctatattacttctgggtcattacaaatacatactgtggctcttgctgggcaactaagggtgtcatagaaacaattctctttactggattgtaacataggtccagaattctagtggactagcacaggctttttcttgtcctctctttgtaagatacatacatgggtgaacaaggactctgaaacaaattagggagggaaaccacccatcaagaggcaattgcacaagtttattaattgactcagtgaaaatgattcaaattattagaaattcagatgtacctagaggacatgatgcattctcatggaaagctggtgtttcccacatctgagtgaatgtgctggattattccccatcaaaatgttagtttgaatcaacaagggtcaataatcttgtgaatggctttatgttctagtatatttaagtacttattgtgtgccttgtaagattcagttgagtgcgcctgtctcattcctgtgagatcctatattttgattattcatccagtatttattgaatgcctattatctataaagccataaattaggcactggaggacagcaaaaagaatgtataatgttgtaatgatgataagacttgaactcaaattattgccatatgaggaaaaattatgtaaaacaaaaaaatcacaattttttaaacatttcataattatatttgagaagaatcctagtggttaactgcgtatggcccttttggaatttctcaagaggcctcttaatattttgtaggacactttttgaaaaagaaggtgtgggcgtggagatgtctttagatttcagacttcctggatttgtttttgaaggacatcaagcacctgaggataaatttgcttctttttcttttttttaagacggagtttcactcttgttgcccaggctggagtgcaatggcgtgctctcggctcaccacaacctccgcctcccaggttcaagcaattctcctgcctcagcctctcgagtagctgggattacagtcatgtgccaccatgcccagctaatttttttgtatttttagtagagatggggtttctccatgttggtcaggcttgtcagtaactccttacctcaggtgatccacctgcctcggcctcccaaggtgctgggattacaggcgtgagccactgcacctggccaatttgcttcgttttttaaagcaaactatttcaagccctataaggaaatgtgaattatccatattagtagaaagtaagctcattaggagtaaggctttgtccccagttatactactgtgacccagccctaaaatagtgtctggcatgttgtaggggactcaataaatatttgttgaatggatccttttagcatctttagtccttgctgtgttttaggtaacctttttgctggacagttccatagagatagtggctcagtctctatgtaaatggttagccagccaaccacctgcaaactcattggttaattagcctttaggtgaccagtggtcaagctgagcaggtcttgaagatgatgaaaatagctctattggtttatcaactatttcagttgtttacatttttaatgaaattgttgggttcagcttagtgaaggctatttgatcctcagcctttgctaggtaaagcaagttgattcttctcactctaaatcagttaactgtgttgatgctggtgtgggaaggaggcagccagagccatggagataaatttacaccctttctgaggatatctgggtcacatttacttattcctttgaacttccttatggttaattctgtctcactatttcccactttttaaaaactgagatgggagatgtcagcgcttgctgccaatgccatcctctttttcttttgtattacccaagtggttggagcagagagaagtgggacaggttggggaatggagtcctggctttctttagcccagccaagaaaggaaacgccaaaaaaatctgctgtcccagattcttttgaaacataggccccagtatttacaaacaaaaaaacaaaacaaaaacacttccccccaagtgctgtctggtctttcaaaggcaccacactgtgattgataattttgtaccactattgatgcggttcatcgctgagagccaaataggcacattcaaggttatagtgaacagacaactttctctgggcagacagtctgtccctggcaatctttcttgacagttcactgaaagggaaacaaatttgctgcagctctggtcaaaactttaaccatttcaagcattgttatgtcttgttggtctgtgtattcaaactcttgcctggtaatagtagtttgaagttacacaatagttttcaagtttaatcagaataactgcatgtggagcagtcattgctaattgcatggtctgtttttctgaaaaaaattggggggctaatggggattggataaatggtttttattttcctttgcttgattcgttgaagggcacttggttttctgttcctagcatgttgtatgtggtcatgatgcatgcatttcacttccacttgggtaagaagaaagtcagatttctttcaaacattactgcgtttgtcacgtctccatattctaatgctttcataaatccagtctctccattatgtggaatatcagtcgtgggtttaagtttgcacatgacgttgaggacagacagacagaaggtaagctaggaaaactacttagaagtggaggggaaaacctcctattctgcaaaaaggttcagttcactttgagccagggaagcataatatagatggtctggtaattttatctgattattaaatgtctgcattgaagtaatttagataaacattgtcaccaatctcagacttttaattctccctacttttctttttaatctttaaagctgggatagcttatttggcacagctgaaatgtcatgatttctgatttaaaaattagacacgtatgccatctacctggtgtcattgcaactgaacctttcacatgcatgagtagaactagatacctagttctggatttcttcctctgtggttgtatggagtagcacatgggcactgtattttaaggactgtgttattgtgtgatggatctctgggtagttagacaccccacaacactaaaaacatagtagaagttattccccaaattacaaagcagctttaataccttgatactcccaaggcaaatatggatttttaaaattctcagatcactgttgaaacccaagacaggttcaaattcaatttggaaagaactccatttaaaactaatatttcagtcatgtagtataatcttggatttggtgcttctccacataacccacagggcttttttctggttcgtggtctgtaagctggatgttgatgataattattttcaggtaactctggcagccaatggaaagtcagccgactgcagtgttgaggaagaaccttggaaacgtgagaaataaggatatgagtctcagcaaattcttgaataaactccccagcgtatcctatggtaactgatgatataaacaagctttctttaaaaaggaaaaaaatgcgtatatttctatgtttacttaatctgttagccgaggcttagaggagctcttgtgagtcagtgatgacaggcacggtgctgtgtctttgccaaataatgctttataaccgtctaattttctcacttgtattattatttgaatggatgctgctggaggaatcagttggaattgaagacacgttcttgccagcttcccttttctcccaagatgcagaaatgtggatgctcttttcccaggggacatgagtaaagcagtgtggtacactccagggacttgggaaaatgagcaaacacacagcgtgttattccttaaagtgttctccatgtctcgccttgttatgcacaagagattctattaaaagcctctagaagtaactccccttaaaatgtctagtaaagcttgcacatggattgattaaaagcaaatacctgtcttagggaattctgacaatttatcttccatatgctctttaagtaaaatgtttcaaagacagttttaaagggagccatgctcttaaaggcagttgattaaagaacctgttacatctctgccttaccctgtgtaatctgtgagaacaatggttgaaatttcaaagtatgtttcattattctttctaaatttgataattgattaggaagtattttatatataaccactgtagatattgacaaaagtaagagagcacagtcaacataaagtttaaccagagttaaatattcaaatttatttatgttcggtttgccttcacctggtgtagtaaaatcaaatgagattatttggtatgtgttttgctttgtttaacccaaaagattattttttggttcctaaagaaaaagatatttttaatctgtcaattatttcagtcatcatctcatcgtcctagaaagcctggtcattttactgtcctcacacatggaagacacttgtgttggctgtgcctcttttaatgtcatctcttgatgaaacaaaaatactggtatttatccaatatgttgaaagcgttttgttatcttctatcaaagcacataaaaccagttataggacacagttggaagcagagccagtcttcctcctcagtcttctcagtagaaaggaacagaaaacaaacatctgtgcaaaaccctataaaagtgatattcctatggcagagtccaggcagccttgaacaatgacatggcaacaaaggatggctctgtacaacttcacagatggaatcttgtttaaggctgtgaagttttaaggaataaataatataattggtgtagcacagtgccttgcatgcagtaggcagccaacaaatccttaatgattggtaatgcaagctaaaatttttaatgtctctactatccttttttattgaataacgcacagtattttcctaaggttgctgggtttgggagtaagcttgggacttgaatcattgagaaataaagcacatttgactctaagaagtatgtagaaccttgtttataggtgagaataggctgtattatatgaaaccagcggagggatgctgagacagtcatggtttatagaatccaaattctctgagatgagggtgcttatggacctcaaatagcctttcttatctgctccttgtgacttctctcttttaaatcagatacctttgaaacatacaagagacatgagattccagttgtttttgtctcctaaaccctagtgatttttggataaggatcactactgaacagtattaggcaacttttcatttttgcttttcaaatgacattggtctttatttccagtagatgggcagtaaacagggtcagggtggtcaagggatatgattaagtgtagtagtagaaaatgcattctttttttttttttttttttagacagagtcttgctctgttgctcaggctggagtacagtggcacgatctcagctcactgcactgcaatgtccacctctctagttcaagcgattctcctgtctcagcctcccgagtagctgggactacaggcacatgccaccatgcctggctaattttttgtatttttagtacagatgggtttcattatgttagccaggatggtctcgatctcctgacctcatgatccacccgccatggcctcccaaagtgctgggattacaggcgtgagccaccgtgcccggccagaaaatacattctttacagcaaatgttataggttaaggagacagttcctgggtttagctgtgaaactgtttaggattttctttaagtggtgttcccaagagcttttttctggtaagttggaggctataggcaaagcgtctaggagcttgttgttttttgctatggaaggccagctttgggatctatatacatgggcatgtttctcaatggagtggtcacaggattctcttctcagaactctgcctgaaacctttccggtgtgttttgtcttcaactttttcctagctatcctattagcctgtaaatatgtcagcagacaatgtgtttggaagaaacaaggtgtacaacttcacaaagcaagttttttctggtctgagacttactgtgtgcaggaagtctcgtgagaatatacttagaaaatcacacttatctggaaattcaataagtcatattaaaaatatacaatttcttgaactcaggactagcctgaaaatccaaaatgcatgtagagttgacatgttgacatatgtctatgtcctctgtttttatttaagcctcatttatttctcccttgccatgcccatttgggattttctttgcccagcatatgtgccataaacagaacaaatggatccagggtatacctctaataacctttatctaaatagaatacatttaacctgtcaattatatgtatagatttatcctaattggttcaacatatatatgaatgcttgtaatagtctgttactatttgataatgcataaatgttatatttatatacagttacagcaggccagaaacatacatacactgcatcctgtaaggtctgtaaatcagggcttcggcaatgccattttgctatagactcattcatgttttttaggaatcagaatcatttcaggagaaaaccaactaagtagactttaattcttctctttctcattcttgccctttgagaaacccaagtggaatcatcacttaattacttactcaaattcaatgaatcaaatccaatccaatcagtgagaagaatagcttatctttcaaggtaatactttaccttagatctttgagggcatgcttcccatacaaagagcatcagaaaatcagggcaatcatctagatctcacagatcttcaacataggactctaggttatgagagctgaaccacatagctatcagtttcagtttttacttcctattgagtgtgtagaaacacagcctatggttttgctgtctgcggaagttaccataccctgtaaaagacaaatatttctttctcctctcgaaccactagtcagcctggatattcatgaaagctgaaagaaggggtgccaaaatgcctagctcctggatttagactcatggaatatgagaaaggcttagggaaaattcaagtcatggggagattcctgctaggtgatgccaggaatctcaatgacctgttgattagagggtctctggtcatttccacttgtgtgtggagaaatacatcatttgcatatgtatctagtcaagaagcccttttggagcaaagtggttgggaaactcatttactgggtccaccaaaggaaacccaattctgccatgtttttgcaaatactacacgtccctttgctctcaatagcaaaagtgatgttatagttttttttacttttgtcagaatcaaggcttcggccacctgtgcaatattttcccatggaatgcagcagtaaatccaagtaggtatatccgtgctcagagagaattctccatagttctgactcctgaaaaacaagtctcattagctctcatctagtttgatgactaaaagtgcacagcagttataccccagtggaagtgatttttctcacctagctgctctctaactcttacggctatctagttgtctgagctgctggtttgttttacttattctccaactgaactcattccaaaccaagaaaaaggaccaaatgaaattttcagttattatcatacttgctccttgaataagaatgctagagtctggaggcagaagaagactaagttaaaaaaaaaacagcctgaaggaattctggagtgagttttgtaagtctaattgtcaaagaagataaatggtctcagtatctgtagtaatttctggttaagcctagagggatcactgagtgccaatccaagcaggtggcactagaggcagattgttctcctagcatagagtgagtttccagctgctcatgacacattttcttatgattttccctaaaagaaaaccaaattttctactccacctcttcctttcctatcattccacttattgttgctgctttgctaacagccagcttagtaagccatcacacaagttagtgtgaggcttggttttaaaatagataacagagaatcttgattaaatagtatccaactttgtagcataacacagctaattcaggcaatgacatagagatgataagaaacaacatggtttggtagagggaacatttgatttagactctgcccatttttagctgtatgacttacataagtcattttgtgtccaagcctcattttctcccatatgaaaagtgaaggggttggattaaatgactaaaatccccttccagccctatgagcccaatgtattatgatctctgctttgtttccttcttaagaggcttcctactataaaatgtgacctatttacattttaagttgaagtagcccacaataatgaataatcaatttagatttttctcatctcctttgggagaaattaaattcaagcctctattcatttgatgttttacaacaagcttcaaagttggccatgttcattcacagtttgatattttgagacaccaataaaagttttttaataaaagttcccttgacttaaactcaccttcctaatagaagtagtgatttggctcacggaaaaatgtttccagagtcaacatgagaggactggatgaacctacagcctcactcaagctgttgcatcattgctgctgtagcaacagagccctctctgaatacccaaaacacacaattttctccaacaattctaattgcccacccagtatgggaatttgagagcctttggtgaataaccttgatcactcttttgaaatttggtacaacacttgcacaatcacggcaactgtttgtaaatatcttttcttctccgccagtatgtagacatgcacacccattcacaagtaagcccgcaaattcattttcacattttcctcttggtttgtttttatcatgggtatcacattgcaggaagagatgctctaacttacaagaatggaattttctgactatcattgccctcttcaaggcctgattagtttgtagggtggatgggatacaatgcatggtctacaaggtccatgtcaccagccatgatctttaaacaacctcttgcactttctggcactgctgcaatggcccatggtggacacctctgctgtttgtccaaacttctgctaaatagagtagtgttggtatttgttgtgttgtgaactcctttgttgtcagagaagacttcagctcttcaggtttgcaagggcaagatgtaaagctaggactgaaaggattgggttttgtttttcggccggcttttttccattagtgcaaaaaacctgatgcaagggcagcaagataaacacaatttcttcattgacccagataagaacctgtagaaaagtgagagatgcccctaagttcctatttcatttatcctaaataatatcctgaataactactgatcagtttttttctatgtccagccttgcttcactttccaacctccaggccaaatattcattttgatattttacaaaatccttctggtttttacacagggcccttttgtgctgagaataaaaccagctattggaacagacctcactgctttgtagagtcagaagttgacctagagaatgggtagcaacaggtcctcagtttctctggagacacccccaatccttgggtgagtgttgaaacctgacaactgactgttagccttgtcatcatcctcactggagatggagatgttgcagtcggagcctcactccttctggggcactgtttcttctcatggcaaccattttgcctgcctggaaacagcctgttgcctttgctagggggcaaatacacacactagccaaggaagttggtccagcacatctctgaggtttctcccccatggacccatggagcgaattccctgagataaatgatcagaaagttggctgtctggtggtttaatactccataagagttacttcccttatagaaagtcatcctttggcatctagatttttctacaaatcaccttaactccctccctttctctttctcctggaaaacctcagcattgcatctccatgttgcacaacacagatcagattatctggtcactatagagatttgtatataaaaaaactacttttttgaggattttgtatattgtttttctatttgttttctacagcttgaggaaagagctggcaaactgtgaatctaacttgatcttgttgccagcagatatattttggcttcctggtaagagtctgtgttaccagggacaatatattgccctctgatcagtattgcaccctaaatccacaaattcctccagcccagtcttacatttttttaaacaaatcccctagcttgtttgctattatttataaagagcattagaaaatgtatttatagacctggatgttatatgtttaatattaatttagcctttaataatgttataggtttgtaactattcttcagaaattataaagaactcagtgtagactgaattaatctatttagtatctgtaattttgcagacatattttcttacagtattttctatgtaaccacacatgtagaattataactaattagagcacaagaagtttcttcagcaatttagagctaccaattgtttcttgactatatagtcacatttgacaaatttaagaacccagtctttagtgatgcaataaacaaaatgaaccattaagaacaaggaattgcttaaatcccttagctggtgaggatatacatctaaataattcatctttctaactcaaggaatggtgctgattttttaaatgtttgacaccaggccttgtttttccagctgagcattctcattttgcttttctctaagactatcaaagacaaggtattaatagtaggattattcctagatcagaatgtttcatacattcctaaaggtttatgtggaaattggcttaggaaaactttgagtagcagagactgaggatgagtgctagagatgaaatcaggacagatttgttgcagttaattcttgccaagcaaattagtggtaaatgtcacattgttatgtgaattgagcacatatttttaaagaaagtttacaaaaaatttttagaaccaactatgaggcaatactgtatcactgggggctgggagtgggggcttagaatcatactgaaattgtttaaaagcagcccaggtagtttctgtcctcaggtgaataacagactatataacttccccgaaaggtaaaacgatagccactgcagagacgaggtgtcttccttccaccaaatactttctgagatggtggtaggagtagtatttttaccgtggtttaaaaagtagtcagttacatagaaagtgtattggtatgtatttgaacctgctcttcattaaacaaacagattagatgtaccctcgactggcaataattgtatctattttcaagtacagctagctgtcaaagcatgaagctcttgtgtatacacactgacacttggttcacgcatgaagaacagtgcctatgcactttgtgtagctataatgtaggtatctaggtgtaatttcagtgaaatggtgtatagatgtattgtaatttaaatgtatatgttatttttggctattcatctaaatgcagtagacatgttgatcggtgttttgcaaacatttctttttccttcttagataactagtcgtgaatcatttctcctctttctcagtgtggcttgggaatatatatgagtgaagaatttatctgtgaatcctttgtactgatgattgtttgaaagtctgtgtgtgtccagcacctttgtaaatacacaattcagagcagggatgggctgggtgtgtgtcctggttcttagtgaaaggtcatctcatgtctgtttaatacatggtgaatgcaactgtggaacttttgattacctagacttaggtaggtttagaatgagaacatccatctacagtcctcctttgcttggtggattgggctcagaggaacaaaaagttagtctgactctgtgcatattagcatcatgtctttagagaaaggtcagcctctctggttgccaaatactcatcatgatgctcatgacttaaaggttctgaggagccttgtctcccttggatttttgagtcagggtacaggaaaaaacattgctgactaactaactgcaaatgcatctgcaggtgaaaccctacgaaagcacagttctggctataaacttcagagttctctgtaaaaaacttagagcactagaagcacaggaatagtgagtgtacagcttatgcggttgtagaggggcaactgatgaacacaggtcccacatatatgagggagtatgacgttctctacctaatatgttctgtgtgcatgttttgaatgattgaagatgggattaactaatgcaagtttacagttgcctcctaaaacacacattctgtataattatcgctaaatacaatgctgtgaggtctatagttcctgtaacccctttctcctccccaaggacagagaagaactagccatgtgctatagggaaccctgagtgccctactcttttcccaagaagggtaaagcctacaatatcatcagggggcatgaagcacattaatttgcagtggctgcttcatatgaggagatatggtggacaggctaatttttccttgaaaatgtggcttcttcaactcctttcaaatttaggatggaatacttcctgaaataaaactgggctttatgcaggattctctttgaaaattcttgtatgtccagaacaaaagataaaactaattgtattcctcacattcacaatccccattggtctgaagtcacgtagcacagagcatctatagcacatagtgtttaaagactaatgaatgcaaaaagataaaatcttcaactaatttttgaattgtttctcatatatgctactagaaaatgccttgttgatgaagcacattttgggtagttgaggtcttttgttttcgcctttagctttctaagctttcttacaatgtggactgattactgtaacatttcacgtgtaaaataactggatattctttatatactggaaataacctgtgaatccaatatttcactaagtgttttaacttttgtgtatatatctctcatcaataaatgtggatttcaattta

SEQ ID NO: 68 - DNA, 1986 bp, Homo sapiens
gcttgactccgccctctctccctctgcccgctttcaataagaggcagagacagcagccagaggaaccgagaggctgagactaacccagaaacatccaattctcaaactgaagctcgcactctcgcctccagcatgaaagtctctgccgcccttctgtgcctgctgctcatagcagccaccttcattccccaagggctcgctcagccaggtaaggccccctcttcttctccttgaaccacattgtcttctctctgagttatcatggaccatccaagcagacgtggtacccacagtcttgctttaacgctacttttccaagataaggtgactcagaaaaggacaaggggtgagcccaaccacacagctgctgctcggcagagcctgaactagaattccagctgtgaaccccaaatccagctccttccaggattccagctctgggaacacactcagcgcagttactcccccagctgcttccagcagagtttggggatcagggtaatcaaagagagggtgggtgtgtaggctgtttccagacacgctggagacccagaatctggtctgtgcttcattcaccttagcttccagagacggtgactctgcagaggtaatgagtatcagggaaactcatgaccaggcatagcctattcagagtctaaaaggaggctcatagtggggctccccagctgatcttccctggtgctgatcatctggattattggtccgtcttaatgacacttgtaggcattatctagctttaacagctcctccttctctctgtccattatcaatgttatatacccattttacagcataggaaactgagtcattgggtcaaagatcacattctagctctgaggtataggcagaagcactgggatttaatgagctctttgtcttctcctgcctgccttttgctttttcctcatgactcttttctgctcttaagatcagaataatccagttcatcctaaaatgctttttctttgtggtttattttccagatgcaatcaatgccccagtcacctgctgttataacttcaccaataggaagatctcagtgcagaggctcgcgagctatagaagaatcaccagcagcaagtgtcccaaagaagctgtgatgtgagttcagcacaccaaccttccctggcctgaagttcttccttgtggagcaagggacaagcctcataaacctagagtcagagagtgcactatttaacttaatgtacaaaggttcccaatgggaaaactgaggcaccaagggaaaaagtgaaccccaacatcactctccacctgggtgcctattcagaacaccccaatttctttagcttgaagtcaggatggctccacctggacacctataggagcagtttgccctgggttccctccttccacctgcgttcctcctctagctcccatggcagccctttggtgcagaatgggctgcacttctagaccaaaactgcaaaggaacttcatctaactctgtcctccctccccacagcttcaagaccattgtggccaaggagatctgtgctgaccccaagcagaagtgggttcaggattccatggaccacctggacaagcaaacccaaactccgaagacttgaacactcactccacaacccaagaatctgcagctaacttattttcccctagctttccccagacaccctgttttattttattataatgaattttgtttgttgatgtgaaacattatgccttaagtaatgttaattcttatttaagttattgatgttttaagtttatctttcatggtactagtgttttttagatacagagacttggggaaattgcttttcctcttgaaccacagttctacccctgggatgttttgagggtctttgcaagaatcattaatacaaagaattttttttaacattccaatgcattgctaaaatattattgtggaaatgaatattttgtaactattacaccaaataaatatatttttgtacaaaa

SEQ ID NO: 69 - DNA, 979 bp, Homo sapiens
tgccagcggcggagtctccaactgggagagctgcagctgccgagaggaggagaacgctgaggtcggtcggaccaacggacgcgctgaccgctgccaactgcagctcgcgctgcctcctgctcgcgccgtgccactaaggtagtccgcctttctatgagccctccccaagattagctgggtgcggggtggtgggagccgttctttggtggctgaagcccctctcctgctgctcctcctgcaggtcattcccgcctccgagagcccagagccgagatggaaacggtccaggagctgatccccctggccaaggagatgatggcccagaagcgcaaggggaagatggtgaagctgtacgtgctgggcagcgtgctggccctcttcggcgtggtgctcggcctgatggagactgtgtgcagccccttcacggccgccagacgtctgcgggaccaggaggcagccgtggcggagctgcaggccgccctggagcgacaggctctccagaagcaagccctgcaggagaaaggcaagcagcaggacacggtcctcggcggccgggccctgtccaaccggcagcacgcctcctaggaactgtgggagaccagcggagtgggagggagacgcagtagacagagacagaccgagagaggaatggagagacagagggggcgcgcgcacaggagcctgactccgctgggagagtgcaggagcacgtgctgttttttatttggacttaacttcagagaaaccgctgacatctagaactgacctaccacaagcatccaccaaaggagtttgggattgagttttgctgctgtgcagcactgcattgtcatgacatttccaacactgtgtgaattatctaaatgcgtctaccattttgcactagggaggaaggataaatgctttttatgttattattattaattattacaatgaccaccattttgcattttgaaataaaaaaactttttataccata

SEQ ID NO: 70 - DNA, 30738 bp, Homo sapiens
ccggtctcagactagtggcttccagttctgactgaagcggtctccagctctgaagcggtctccagctctgaagctatctccagctctgaagcggtctccagctctgaagcgatctccagctctgaagcggtctccagctctgaaacgatctccagctctgaaacaatctccagctctgaagcggtctccagctctgaaacaatctccagctctgaagcggtctccagctctgaaacagtctccagctctgaagcggtctccagctctgaagcggcctccagctatgaagcggtctccagctttgactccagttgtttccagctcttctggactgacttctttccaggtaggaagaccaatgcagggtctgagggatctggaaccttcaccacagtataactaatttcttcaagtcctgagtgggcaaaggtggtctctggggagatggtgaagggtggggtatcagagtgtcatgtggggcttggaatgatgaaggaagttggggtgaccagtcaaggaggtccccattttccagcccggcaggctctccgtgtgttgttgggagtggagtaaggggctagtccctttgtccagtgaaataagagtgtgctcgtgtgtcaatgagctccccatggggcctgttggagagcttgggtctcatttaggagatgatgtccacagattcttgcttaggcttatgagaggttggtagagttgtgaatctggtttgaatcctgagtggaccagaaacttgggcaaaatctaaactcccaagccagactcctcatctgcaaaatggcgataaaattactggataatctagggttgttgtgagaatttaacaattgagtgttcaggcttttgacatttattggagacagggtctcgctctgttactcaagctggggtgcagtgtttgctgtgctcacagctcactgcagcgttggtctcctgctcaagcaatcttcccacctcagcctcccaagtagctagggccccagttgggcatctccctgcctagcttatttttgaagtttttgtagagacagagtctcggtatgttgcccagtctggtcttaagctccaggactcatgtagtcctcccacctctgcttcccaaattagtgagattacacgtttagaaatcaaaagttaagagatgaaagtttcggccaggcgtggtggttcacgccagtaaacccagcactttgggaggccgaggtgggtggatcacgaggtcaggagttcaagaccagcctgaccaagatggtgaaactctgtctctactaaaaatacaaaaaaaattagctggatgtggtggtgcacgcctgtaatcccaactactcaggaggctgaggcagagaattgcttgaacccaggagatggaggttgtagtgagctgagatcgtgccactgcattgtagcctgggcaacacagcaagactccgtctaaaaaaaaaaagatgacagtttagaggtgaaaagtgataggttttgacatcctggtttcaccatctgatgcaggtaatctgcaaaatgtggataatgaatcaacagtggttgttaaagttttaacttttaaaaactctcttgctttcttcatcttaaattcagtttataaatatttttgtattatttatacatttactaaagtttaaacaatgcgttttaaaaatactttatattttaaacttcatttatacttttaacatatttagtttatttttataaattattgcaattgtctaatataacaaaacttccaatctatccaaataatttttataaatctaatgagcaccaggcagaggtagtaagctggcaagcaagcagctagtgggctgcatttagcttgacatggattttgcttggctcctacagttgctttaaaaaaaaaacccacacttaaattctgaatatttttatttgttttattttgagaccaggttatgagactggttgatttttgtatttttggtagagatagggtctcaccatgttggccacgctggccgcaagtgagctgcccacctcaggcctctcaaagtgctggagttacaggtgtgagccaccgtgcctggccaaaattctaaaattttacccgaaaggcttaatttctagcttctgaaatgtgagaaaagtagcaacacttgccccagttcccagcagcaacagccaggcgaagatgaggcgtggctgctccatttagaggaaaatcagtgtgtcagttctctactctgagatcttttttgtcccacctggcctttttctgttttcttttttgagacagtctcctccatcacccaggctggggagcagtggcaatcactgctcattgcagccttgacttcctgggctcaagcagccctgacttcctgggctcaagcagcccccttgccttagcccgctgagcagctgggaatacaagcgtgtgccacgcccagctaattttttaaaaaaatttttgcagagacaggtctttctatgttgcccaggctggtcttaaacccctgggatcaagggatcatcccgttccagcctcccagagtgcagagattataggcatgagccactacaccaggccaatagcaggggattttaagggaacatttttaactttaaaaaactaatctcttggctgggcgcagtggctcatgcctgtaatcccagcccttccggaggccaaggtgggcagatcacgaggtcaggagttcgagaccagcctggccatagtgaaaccctgtctctactaaaaatacaaaaattagctggacatggtggcgggcacctgtaatcccaatactccggaggctgaggcaagagaattgctagaaccctggaggcagaggttgcagtgaaccgagatcacaacactgcactccagcctgggcagcagagcgagactctgtctcaaacatacacacacacacacacacacacacacacacacacacacacaaactgatctctgccaggcacagtggctcatgcctgtaatcccagcactttgggaggtggaggcgggctgaggcaggagaatcgcttgatcctgggaggtagaggttgcagtgagctgagatcgcaccattgcactccagcctgggcaacagagtgagactctgtctcaaaaaaaaaaaaaaacccaaaaaaacagcaaccaaaaaaacctgatttcatgggggcaagattcaaatgtcaacttcagtttgagattaggaggccctgattcattaaaccgatagttatgtattggacctaccatgagttgaatgcatgcatacagtgtggtgggaagggtctgtgagctctgagaggccagagtttgagagtctggcggtgcttctagtcataacagacacataataggacataaaaggagtagtatttacctactaagttccaggcctatgataatgctttacactcactggcttgccaaataacttataaactatacaaactttattatcaggaactgttatatttaataactcaggcaaaatattcacatactcttaccagtactaatagtcattaccatgattgatcttttaggctgtctttgacaaacagaaatggacagtgtcgtacggttccagcatttaacctctcctccacctcaatcttacttccctacgtttctctttgcctcttctttctcacttagttttgaatcaattatactttgtcgatctgttagctgtcttagatccttttaggagcagcatacaaatagaaaaatacagtctcccatatcccacaaccaaatataaccacaatgaacatttttgtgtattgctttccggtatttttctctgcatatttatgtacatattgaagccaggttgaagacagcctgtaattatgtcagccctgtgttctgttccgttagcatttctccatttaaacctgactctttgaagtccagtgctgtctcatgactagataacacattatttgacttttctggaattctggctgtatctaaggggataggtttcctgtcactgagcctgactgaacaattctgagattatcaacactgccatagggccccgaaaaagcgtctaatgaatgcaaaagttcaaagcggttttgttcaggtgttatttttggagacactttctcaggcttttatgatgcaatccactttgtgcccctctcttgcagcagctgcggccagggaaaaagcactaagtgggcttgctcactggtcctcaggggtgggtaccctgggcaggtcagcccagaagtcagctgcctcctctccaggccctgcctggacagctgagagtcaagcagacagttatgtgccatccctacctcttttctgtcttcagtaactggcagcttcatcctgccagagagtttggaatgagctaggactttcccatcagtctgaactcctgggttttcccaggcctggtgactcagagggtaaggcaccgagccgaggaagagaaaggagaacctggactcctgggtgcctttgtctcaccacacaatcacctcccaggaaggctgtcatccaatcactcctgtggaatctctctgccactttgttgtaaagaaagtcagccccagtgaagggtaaaaagaagtgccagagggccttggggacaagccatatactggtagaaagggcactggggcagggtccgaacagctgagagtatgtctagcaccaggatgaaaatcagtagttcacagagctgctttgtttgacctactccgtatttttttaatggtacatttcacataaagacctgtatatctggcttccccacaaaagtcaagatctgacagcatctgactatattttctcatgcaatatctgaagctgggtagcagccagccctggatggggtgtttcctctccagattaacacagagcctaccaacttgttaaatctcacctcataggacaataggcgcaaaaatatactgaaatgagttgaaaaaatggtaatactttttttttttgagacagagtctcactctgtcgcccaggctggagtgcagtggcacgatcttggctcactgcaagctctgcctcccaggttcatgccattctcctgcctcagcctcctgagtagctgggactacaggcacccgccaccatgcccggctaatttttttttgtatttttagtagagacagggtttcactgtgttagccaggatcatctcgatctcctgaccttgtgttccgcccgtctcggcctcccaaaatgctgggattacaggcttgagccactgtgcccggtttggtgacacttttttgatgaaagtatttttttttaatttaatttttttgagacagattcttattctgtcatccaggctggattgcagttagctctcactgcaacttccgcctcccgggttcaagtgattcttgtgactcagcctcctgagcagctgggatttttttatatttttagcagagacggggtttcgccatgttggtagacgggtctccaactcctggcttcaagtgatctgcctgcctcggcctcccaaactgttgggattacagatgtgagccaccacacccagcctcgatgaaagtattttagatgtttgtatttatacataaggctctatgtttgaagtactaaatggtgagagtattttgtatctcagatggaataacgataggaaaatgttcttcagcaaattgtactctcctaaagggagagattatagagtgatgaacacagacacgccatctacctttcctccagactttgtaaaaaaaaattatataaattacaatcccaaactagaatcagataccatccctgatctactaccaagatctatacacattaagagaacaatgttcgggattgaacctgttttgcctttttaatcggaacacaaaagggatacctttttctttctccaagtttttgaaattttggtctccctcctacattcactccttgttgaaagtaatggaaaggcaattaggtctgtgtcccaaatgaaagcccacagtcaggaggggattctcattgaggtgactgtcctgttaagacctgctcctgtgaacccccaagcacagggcagagcaggacatgaactaagagccaggctttgccgaatccgggtcgagttcaccgacagcagtgtgtgcagcacgcttcctcctctgcaccctggcagtagagcccttcctcattgtaaagccaagtggtgtctgcagtccgccttgcccagggctggaggcagagctgagcttggtgaacaggtgccaggggattcctgtcatcagtggactatgctttagaagctgcttgttgcaaaggtactggttgatcattgtctgagagttggatctgaaggccaacacccactagcaaaaccatcatccctgtaataacagcaacccaagcagatttgatttctccagtgaaggttctagatgagtctaatcaaggcttcccacccatcttctcccaacaccagagtttccctgtgaaaacgatcatggttaactcgcactgaatactatttatgtgccaagtaccattccacattctttacatattttagctcactttactccaacggggaccattattcccagtttgcacataagcaaatggagccagggaaagcaaggggcagaacagggaactgatttcccggagtttcggcccagagtcagtgtgcttagccaccgccaacaccagccccagagctctaggctcctggaagtcgtgctcccgagtccttccccttgcacagtggagagaactcgatgttggaatgaaaccagctaattccagtagggtgcttccgctgttgtgaggagctgggcaactagtaagctcactgagcctcactgtgctccactataaaaccaggagagtgcgcagcagaggagagggtctgggtttcagaataagaagcaggttttcttcctgctcagcaaatcctgggtaattgtatcatatcccctaaccccttaaacctcagctagagagggcgccagtcttagccccagggaaggctttcgtgtgcacattggagacaaagcctgcccagcagtgcccggcacagaactggggagctgttgggataagcatgggggtggactctccctgggacagatcctatctcacagcagtttggagaactgttgtatacacacgcaggtgacacgaggcagagcaggatgtgaaacgagcgcagtggtttgccaaacccgcagcaggcttaggacggagtggtgagaacagcccccttccttttcctcagcttgacggtcccagcctttcccattgcggacctagagcccagactcccagggcagaaagcgccccacagactgataaaggtgaacaatccaggctttgtttccaagggctttatccctgactttccaactggcttttatctgtgtcttcacgtctctgacctcttgagcctcacaggagctagactagaaggttcaagttcttgaggagaaggcaggggcgggagagccccacttgcgggaatctcgtgcggaccgagtcggggcgggagagggcgcgcaccagccaggctagggcgcgcggggcgccgaggggcgcggggccgtttggggccgttcgggccagttcgcgcggcggggcccgtcggagcttttctctcggcagcctggctggccgcgcgtcttctccgcgcagcgggcgaagtcgcgatgggttcattaaggcggcaggtaggcagtgccccggcggcggctgcggcaggcggtcctggaatgtgcgaggggcgtgatgacagcggccagcctctttgcgcaacaccttcgccatatatacccggggcgctgcgctccacctggccgccgcctccagcccagcacctgcggagggagcgctggtgagtaccgccgccggggcaggggcgcttcctcgctctttcaaggactttgattcacttaattcttgcaaatacctctcggtgctgacttcaaggaacttggctggctttgggccgcagaagtgaaaaacacaaagctctccacaatgttcaagttgttttcttcttaatgttacggttattgcttttattacagcttttgctgctacactcttacgatcgacagtgttattaatcagccacacttgtggattctaaaatgatcactgttttgagagtcgtggtttggaagaggaaaggcccaggggatagaaatctccacctaggaatcaggatagctaggctctttgtggctgggtcaccaactagccatgtgacaacgctagtccctgtgagcccctgggctgccgtcttccattctttataagaaggggaatgcgacatctcaggaccatgaaaattctaggtttgtggtggctgcctggtgatgtgacactgccccccacccaagtgtgacttccacgtggtacagtgcttgtttgcagttatttaaggtgcctaggagacagtcttagtttgtttctattagggcccgtggccatcagcgaagggtccgtccttcagccgtcttggggagcaaagcccgcaatttatgttttccaagccacaaatgggtgagcaggctggggagataacttacaaggagatgtgcacaggagtggttgggttcggggactgcgcatcctcaggccagaaagttgggggctgcatggcatggagttagttcaggttccctgcaacggtgcctgccaccggtggctcgcactgcgctgaagagagttggaatctcgttttctttgaggaggtccctttttcaaacatgttgatttcatggaagcagcttgtggatttcatcactcgagtcccctcttcctgtttgggtgccccagggggtttctgtgttagccctgatcgctctgggccttgtcgttctttcctttttccttcttcccttgtgtgctggcagttctttaacttgtcctgggttgggtattcttggaaaactgtgcttgtaggagtggccgttgtttcagattgttaaagaaaaacaaaaataaaaaagattgcctcttttgtcccatgcccgctgatcatgatcttctctgcttttgtaatttggggaatgggtgataagaaaggcgtgctttgtaaaaggtttggatgctaaacaaattgccccatccaaaactccccaaattgctcaactgtctcaatgaagcaagtcccctgtggtatgaggatgggcttctgattgttgctgttagacacaaaggggacaaaaaaatagcccgaattcaatgcaatgaggaaaacagcctcacagaatcagagtgctttggaataaactgggctttagtaaccagtttcaggcatcttccactcctccatcctcacccacacccccacttccattctggggaccgcagggagcaatcaggacatcccagggaatttattcatctcagtgaatttttaaaatgcaaaggtacaaaaagagggctataaaaagattgcggtatttttaagatgtttatatttacaaatttaactgctttaacctccccccccaatacaatgcagcacaactgatatagttacaagttatttacaggatttattttaagatatcataaatacaaattgatagtgcatggtgagggtgtggtttggtgatatggcccaagtttaaagtttattagtgtgccacatcaaaaatgtaaactcaagttatctatcaatgtgaggcccaggccaattgcttccttgactcctctcatcactaccaccattgtgtccttgaagagattattattagcagtaatgtagggacagggtctcactatgttgtctaagctggtctcaaactcacaggttcaagggactctcccactttggcctcccaaagtgctgggattataggtgtgagccaccacccttagcctataggggtgattatttttccttgtgatggctgtaagggaagcagaggaaaaggagacgtcaccctcttgggaatttttgaagcacagagtcattctttcaaagtacaagaaagttttcctgggcatcccgagaacactggcctgcatgaggttgaaattatctctgcagtgttgtggtgcctatgtgatttgaagccattaacctctctgtggctcagtttttccctctatagaatgaggatactgttcattttaaaggagactctaagtttacatagatacatgaaatgctgtgagtaaatttgtgcaccaatttgcaagtgccaggcacaaagtctttaataaacactacttggctaccatgtgcccagcactgtcctatgtgctggggatacaatggccatactctagtccctgtgcttgtgaaggctgccattctgatgggagactgtgtgtccatgttctggttcctcacaggaccactgccctgggcttcctcctctccccatttcttcagatggccttgactgctgctctgggcacaaggggcccaggaacaggtcttggttggagaagcccaaacaatgcgaatgtaggggttgggtgactgccaggtaccctacattcccctgcttcccaagtctgagccaagtcaagaaagttcctctcctgggtcttcaagaaagaataagagctctttctggcagtgggtgcccatgtggtgcaggaagtggagccaagagggtgaggcacacaggcaactcggttatagaggccagtgtggcagcgggggagcccctccctgggctttagtaaaaagcttccaaatgatgacttctcccttcctctgctgcttctggcaggtggcaagaatgtgctggagtgaggccttgggaaggctgggagagaacaaggcagtggttgcgccagggctatgggggtaggagaaaggcttagaggggctcagagctccagggtacattctctgcctgcaccatttaatacccacccccacccacccaccccacccccaccaccctcccctcctgctcatccattgcaacattcttgggcgggcatttccagcatctgaatgatcatgtgggagtgacctgcagacatgccaatctagccagctatccgaaaacactcagagccctcaatgtgcctagacctaaggcccctgggtgccctggtgctttgagggctggagaatttctcctccctttgcccctggctgtgagatctgtggaaaagcttctggctttggagccagcagtcttgggttcatatcctgacaccagctccaggtagttggaggcaagcttctttgtttctctgtgcctcagtttctttgtctgtacactgagaagaaaaactccttccttggtagatttaatgaggtcacaaactgtataggacactcctctgccacaaaacaaacattagcatctttctctcacaggctttggattcatttattcaaatattaactgagatccactaccatgctgagcattggagatgaagagcttatagtctagggtacacacagtggaaatgaggccatttactgttcatgacacagtgcatttccacgtaataaacactcttgtttattgttcatgacacagtgcatttccacattgtgtcatgaacaataaacaagagttccgagtgtttactctgccaggcaccatgctctagcctcacctacacttattaaccaattagtcctcataacagctcagtaagcaagatggtattgtccccatttttacaatgatgaagctgaagctcagagtggctcagggttgcatatagtgaggggcaggcctctgcagagccagccctccctcactgtgattcgcctctctccaggtatcactgagccatcttacctttgtgagcttagaggttgagttgcatcttttaaaataattttcttctaaaatttaaaaaatcacccacagtctcaccactcccttttacctccagagaacatttctggatcttgtctgccttgttgagatgatgctgtgaatgggaaaaagaagtgctttagatgtgaagtttatctaaagcatttccctatggttttactgattcagtataacctctttaatggcatgctcttacaatgcatggacataccatagttagaaggagtaatttctcttttttcattttttcacactgtaaatgatagagcagcaaatatctttttggtctacatcacattcattctatcataaatatgcccggcagggctcaagaccttaaagatgaagtgatggacaagacaaagtccactttttggtagggtttgcagtctggtaagcaggaaataggttgacgaagaaaggagtcaggtggactcaggctctaagaagccctcttggaagaggtgatcagagtaagttaggtatttctgaatttctgagaggaaatattcctagcttcctgattcctagaagtgaaatgactgggtcacagacgtgtgatgaacataaggcactttggacagtttgctaacttttccagagcttctagcagtgttcaactcataacatcttctccagcatagcataatgaacttaaattctttttgctactttgatagttgtcactgttttagtttgaatatatgggattgcttctgtttttttgagacggagtttcactctttttgcccaggctggggtgcaatgatgtgatctcagctcactgcaacctccacctcccagattcaagtgattctcctgcctcagcctcccgagtagctggaattacaggtgcatgccaccacgcctggctaattttgtatttttagtagagacggggtttcaccatgttgtccaggctggtctctaactcctgacctcagatgatccacctgcctcggcttcccaaagtgttgggtttacaggcatgagccactgtgcccggcctggattgcttcttttttaataggcattttagccatttgttccttttctgtgaattgcctttctccaatcttttggactgctttgtctaatggacaaggactaattgtctaatgtcaaagaacaaggactgcaaggactggaatgtgaggtgtgtcaagtaccatgtaactgagaaaggccttgtgaagaaaatagattgtaagaaggtcttttctgaaggctgaaaagaatgtggttctaacaaaggatgattaatccagacagcatgacatagtaataattgctgctatttattggatgcctcctcaatgccagtcactttctagacttttaatttcactattagtctcataaccctgcaagaactgttccattttatagatggagaaactgacactttatgctcagaggcataaagggacttgcctaaatacacactcattaataggtggcactgctggattttaaaaccaggtccatcactcttttcacagaaggcctgggtggtaggtaaaacacgcagaaggtatatgaacacctgcatatacttatatattttgagacagagttttgctctgtatcccccaggctggaatacagtggcatgatctcagttcactacaacctccgcctcccaggttcaagcaattctcatgcctcagcctcctaagtagctgggattacaggcacccaccaccatcccctgctaatttttgtatttttagtagagacagggttttgacacgttgcccaggctggtctcgaacttctgacctcaggtgacccacccaccttggcctcctaaggtgttggagttacaggcctgagccacctcgcctggcccctgcatatatattcacatacacactaagttgtataaatctgttaaattccactggataaggttttgcatagatttgcagtgcacttgtcttgatataagaagtagatggggttccattgaagggttgtgaggatttggcatgctatgagacaacaaagatgaatgggcttgcaccctgcctttttctttttttttttttttgagaaggagtttcacttttgtcacccaggctggagtgcaatggcacaatctcagctcactgcaacctctgcctcccaggttcaagcgattctcctgtctcagcctcccgagtagctgggactataggcgtgtgccaccacgccggctaatttttatatttttagtagagatggggtttcaccatgttgtcaaggctggtctcaaactcctgacctcaggtgatccacctgtcttggcctcccaaagtgctgggattacaggcgtgagccacggtgcccgttgcaccctgcttttgactgaaggagagagtcaagacaaaaacaagtttacgagattaaaggtggtacatgcagctaactcaacactgtacgaggtagtttgctttagcgactgggtgagtgtttgaaggggaaccacagaggaaatatggtgcttaatatgccacacttagggggcataagtgtgaaatctttcccttccttttactgccgcctccggccgaaacccccacccagttgatgctttgcaaccaatggttcttcctcttatagcatctcggtgtgcctcctttccatgactgctgctttaagctgttttctcatccacagaccatggctccctggcctgaattgggagatgcccagcccaaccccgataagtacctcgaaggggccgcaggtcagcagcccactgcccctgataaaagcaaagagaccaacaaaagtaagtgtcgctcgtttgtctgcagatcggcctttgtgaggaccccaggagactcaggtctgattcctcattaccccttttgcttgtttcagcagataacactgaggcacctgtaaccaagattgaacttctgccgtcctactccacggctacactgatagatgagcccactgaggtggatgacccctggaacctacccactcttcaggactcggggatcaagtggtcaggtaaaagtgaggccagctgagacattcaggagggaaacttcctgtggttcacggtgtcatcatcctcctgtccctcccccttttcattgttctgattcccttgaagcaagggtcctggctagggatgtcaccctctcatctttttttttttagacggagtcttgctctgtcacccaggctggagtgcagtggtgcgatattggctcactgcaagctctgccccgtgggttcaagcagttatcctgcctcagcctcctgagtagctgggattacaggctaatttttgtatttttaatagagatggggtttcaccatgttggccaggctggtctcgaactcctgacctcgtgatccaccctcctcgaccttccaaagtgctgagattacaggcatgagccacagcacccggccaccctcccatctttgaggtagagtcaaagcatgttggagtaattgggggtcattcattcaacaaatgtgccaggcactgtggttatagcaaagatggacattgtctggctccttataattcgctgtgggtgatgaggttccaggtactgctttggagatgctgtggatacagtgatgaacagaaaaggcccctcttctcagagagctttcagaggggtcccctcaccaaaatgtgggcatatttctagtaaaagaaaatatgcagccagacagctggatgcaagcaatcactgtttcatttccaaatgtatgtagggcagaaggtctgtctgtgaactagacagcaaggaggaaaaaggagattggggtgtggggtggggaggagaggtaggaaggaaagagctgggagggggaagatgagaaccattttaaaagccagtggagtaaacagcacttaaggatgtagcatcccaggatgtatgatgccccaagccctccataaattgaggctgattgctgctgtgcagctgcattctagaaaatactctgtgctgtttggaacgtgacagccattatctccgaccctgcacttagcaggtggctagtgctgtcaactgcctcactcagtgacactgtggctcagctgagcatggagcctggtttttctgtcgcagaccacattgaacccctcctcccaaacgcaaatcctttagaggcactttaccaggggtttcagctaaatggaccacagcggtaactgctttgaaagctgcagcgatggctgcttcccatctgtaaggctggctagacataagaacttaacggctgccaggctgggaagggaggggaggtcgggggagctctgagctcattgccaaacttctcagggtttccaacactaaaagtttcatgcctttctctctctccccccatcccacccccctgcagagagagacaccaaagggaagattctctgtttcttccaagggattgggagattgattttacttctcggatttctctactttttcgtgtgctccctggatattcttagtagcgccttccagctggttggaggtaagaatgaaagggtgagaggtctgcgggtgaggggcattatcttgaaatgtggttccgagagtaaaactcagcaagccctctccagctgcagcctcctggagtgttttaggactggaaccgacctcagatcatttatgaagtctatgctttccgttatagaagagaaaactgaggcctatacaaagggctatgacttggcccaggtggcttaggccaggagctggggctagactattccaagctatccgccagttgagtttgtccacaaaccccaggcaggaagttgtctgacatacagacttagctgaggaattcctatatcctccacaccagagagaattctggaatgagaaagagtgccctttcaaatatgggcccttgctgggggaaggacagggccccttctctgggctggaggaatctgcatccattgtacttaccttcacagcccttagggctgcgtgtgcccatgcagtgtgagaacccaggagtgaagtcaccatgtgcttggttccctttgtacctcaatggtgatgtcagaaacaaacaagcagcactccgtctactgggtgcaggcattttcgggggccctctatcaaacattctttcccagagccctcccatttacggagagatcatgaaccagccctgagactcacagcctgtgattagcagagtaagattcagtctcagatctgggtgacacaaaggaccatggatttctgcaacccttggtgcctttcttgggaacccatctgtgtgacttgggagagttggggaggtgggcattcatgggagagcatgaggggcaaacacttcctggacattgcttttttttttttttttttttgagacagagtttcactcttgttgcccgggctggagtgcattggcgtgatctcagctcaccgcgacctccacctcccggcttcaagcgattcttctgcctcagcctcctgagtagctgggattacaggcatgcaccaccatgcctggctaatttttgtatttttagtagagacggggtttctccgtgttggtcaggctggtctgcaactactgacctcagttgttccgcccgtcctccgcctcccgaagtgctgggattacaggtgtgagccaccgtgcctggcctcctgaacattgcttctgggctccctggtccatgggagcatcagctaggggctttgctgtctggttatctcagacaaatcacctgcatcctctgggcttccaccttctttatacaatggacttgggaatgcattgatggtctcaggtacactcttgagaataactctcccagcattcaattacaggctggtgctagggctaagggtggatagagagatctactcttggaggataaatctgaattgggtatacaccccagagacatccaggaggctcattggaacccactggtcccagtatggagttgaggctgggttcctgagcacagaagggcttgctgactgaggagtgtttgaagagtgggaggatgcagggtgaaggaacaaaagtaaccaggggctcacagtgggtcgggaaccagggcagagagacagagacaggaggcacgtgtgggcagctagtagatttcctgccttatcggggcagcactgggaagaggcatggggaagcaagattccttgggtgcctgcagcgatggaggctggactctgcaacccacagccagctggccttggatggagacttctgtttactcagtgcccacctaatccccctcgatcacgttgtgattgtttttgtttgtttgtttgtttttcccaggaaaaatggcaggacagttcttcagcaacagctctattatgtccaaccctttgttggggctggtgatcggggtgctggtgaccgtcttggtgcagagctccagcacctcaacgtccatcgttgtcagcatggtgtcctcttcatgtgagtcggggcacccatgagcccacctgcattccagacactctcctgtctatctgagggtgggaaggacgggggaggaattcactctgaatatgtccaggccttgccaccattgtcttggtatcttgccccagctacaatgtgtttccctcttgatccaaggcaacttcctgtttccatttcgatggcaggatctggaaatagaccctgctgctggagttctcagctctgaattctctagtactgtactttccagacctgtagccactagccacatgtggcagtttaattttgttgaaccttaattgatttaaaattaaaatataacattcagttcctcagttgtactagttacatttcaagtgttaaagagccacatgtggctggctggcagctaccctattgagaagtagagacatagaacatttccttcactgcagaaagttagttctctgggacagggccactctcagtgctaagaagaaagacaacttaatcacatcacaaattgctctgggacaaccgagcttgggagatggcacactaaacttgtacctgtctgataattgctgcagctacgttggacagaccctctgagggggaccagtttgaactgattattattatttttttttctattttctttttaaatagagacttgggtctcactgtgttgcccaggctggtctcaaacttctgggctcaagtgatcctcccaaaatgctgggattacaggcctgagccacagcccctgaccagaactatttttcttcccaagctagcatcttagccaaaattaactagaatgtttctcgtccagttagaaaaaggtattacactttcaaaatattttacttgtttatatcaaaaaaggtgcagcaatatgctgattttgttggaaaaagttacactgcctagaattaaatgtctgatatccagcacagaaatgatgcttcctggctgggcctagtggctcacgcctataatcccagcactctgggaggctgaggtgggaggctcacctgaggttgggaatctgagaccagcctgaccaacacggtgaaaccccgtctctactaaaaatacaaaaattagctggatgtggtggtgcatgcctccagtctcagctactcaggaggctgaggcaagagaatcactttaacctgggaggtagaggttgcagtgagctgagatcgagccactgctctccagcctgggagacagagcgagatccatctcaaaaaataaaaataaaaaagaaaagaaaaaaaactgatgcttccttaaaggcgagcctgtgtgccatgcacaactgactcaactgtacatgcaagccctgcactcatccacctaagtccttaatcagtgggtgcctcctggtctccttcaggctagccttggatctgcaatagggaggaaggaggaagctagaaaggcactttcttcagattcatagtgaggtgcagagtgaggtgcaaaaaaaaagtttaagaattcacttgcatagaggataaaaactacttctttagaggataccagcataggtaactttagcctgcctccaggctgcctttctaagcttgctaatggtacttttccatcctctagtgctcactgttcgggctgccatccccattatcatgggggccaacattggaacgtcaatcaccaacactattgttgcgctcatgcaggtgggagatcggagtgagttcagaaggtaagaggctcaaaaccagcctttgcgacatcagctctattgttcttggccacgctgttgtaactgcttttaaccagccaaagatgacatgcttatcaggttcattcctggagttcctagaagtaaccacagggaggtatggctagggttggatcacatactcaccagctgattagactcagctccctgatcggcagagcagggataatactatctatcactactgagttgttgtaggattaaatatacaacccagcaggtgagtgttcagagcacccagcacattgagttcactaaataaatgcaaactctagctagaaacttagccgctgggtggcggaattgaagcaaggccagttagaagagtaggatttattgggactgggcgtggtggctcatgcctgtaatcccagcactctgggaggcccaggcgggtggatcgcctgaggtcaggagcctggccaacatggtgaaaccccatctcttctaaaaatacaaaaattagccggccgtggttgccagcgtctgtaatcccagctactctggaggctgaggcaggagaatcgcttgaacccgggaggcggaggttgcagtgagtcgagatcgtgccactgcactccagcctgggtgacagagtgagactccatctaaaaaaaaaaaaaaaaataaataaatactgttttgtttggtcataattataacttatttaaacttccactttcggtcagctcaacccatgccaccttttctttgttcttcacttacaagttaataaaaaacaaaacctagtttctgcgtatgcagaaactctgaaactagagcaggtagaatgctggaaactcttttctttcaaaaaggttaatgtgaaaattaagtgtttcttagcctcttctagctagttttttttttttttcagtttttttttaaaaggtaagctgtttcattgaagacataaaaatccagaacagagttttttaaatctggagataagatggaatcgaggaggaatctttgaacctcctcagatggatgcaaaatgttttagccttgtttcccatggaaactattcatgtttcatcactttcaagaacttaaaaaaagtttaagaattcacttgcatagaggtctttttaagttaaatttttttattgatacaaaatatttttacacctttctgggaaacatgtgatattttgttacattcatagaatgtgtagtgatcaaatcagggtatttgaggtgcccaccgctttggggatttatgatttctatgtgtttggaacaattgaaaactccagcatagagggctttggttgccttcatactggtccccacctttccaaaagaaggtagccttcaatatacatgatacaaaagtgcccttgatgcaattcttcgaaacagtgattgctgagctaattattccagccgtaacatgcttgctggcccgcagcttcttcatctggccaatgggaatatagataccagccactttggggatcgatatgagagaacaaaaatgagattgtgtacatgtgcacacttccataggtgacacctagcagagggtggcagatgatacaggtaatgacccacctcacatggtgcccacttgcttagtgactaatctggctgtcggggtttccctcccatagagcttttgcaggagccactgtccatgacttcttcaactggctgtccgtgttggtgctcttgcccgtggaggtggccacccattacctcgagatcataacccagcttatagtggagagcttccacttcaagaatggagaagatgccccagatcttctgaaagtcatcactaagcccttcacaaagctcattgtccaggtaacttagctccttcagagagagaaggagactaacttcctacccacaacatcccctacctgagctgacagatatagagtgtctacaacactattctgggcctggcatggtggctcacccttgttttcccagcactttgggaggccgaggcaggtggattgcttgaggtcaggaatctgagaccagcctggccaacatggcataaccctgtctatactaaaatgcaaaacattagctgggcatggtggcgtgcacctgtagtcccagctatgtgggggctgagaaaggaggatcgcttgaaccccgggaggtcaaggctgcagtgagctgagaattgtgccattgcactccagcctgggtgacaaagtgagactgtttttaaaaaataaatagatgaataaacactactctgtagctgcctctggaaaaggccaagggaggcagaacttttgggccacctgatagagtgactgaccttgatggttactttgacttccataacatgccacctttattggggtggaggtgcttcttaagactggacacttgagaccactttgttcccactgctgtcctcaacaccagtggacttgataaagtatgatctaccctttcctgcctagagtcatctcagccccttctccctgggtccttgctaggaccttgtgttttcactcttactggttttcttggccattcagtcatccagaaaatatctactgtctgctccctagatatcagtgcctctgcagatagagtgagtcccactttgcctctctgggggctcacagtcacatttatctccttagagcccctctcacttcaaccccctgggtttgtgtcctaaatcggttctgaggatatgctgatggtttcctgtctactgtttccacagctggataaaaaagttatcagccaaattgcaatgaacgatgaaaaagcgaaaaacaagagtcttgtcaagatttggtgcaaaacttttaccaacaaggtacgtttccaagaatattcccggggcggggagtgaacctttgcatctgaacatgaaactaaatcttgccttcaaggaaggtaaatagaaagtcaggggaaagaaatattgggagtccctgaaaaatcaaaagtgaccagtgaatgcctttagaaaacaagtccttgaatgaatgccaaatgcaggtaaacagtaggacagacagactcccttttgccccatcccagggatacattatttctggtttgttatttccatgcctcttggagaaggcttagctctgcctgccgctctgttctcatttttggagagacttgtggaagtagtccagcacgccctacgggtgttggcagcaagtgtcctctctcttactttccagacttttccagagtattccccctgctcgggcccagagcattcatgccctctgtcaggaacctacccaggctgctttgcacctgggttgtggcttgcccttgcttctggggtgtacatgtattttttttgtggggtgctaaagactggagactagaataaacaaagtagatgtttttaaatgatgaaggctgatttcagttgtcctcagttattctaagatttctaataaaggtgagaaataagtcttcaagagaaaagaactgttctgttggggccatactgcatgcaccatgggtggtgtctgcgcctgttcattcccacccccgccattgcctcccattccccactaaaagccagtgttgtgggcatttgtcatgtttgtcatccagacccagattaacgtcactgttccctcgactgctaactgcacctccccttccctctgttggacggatggcatccaaaactggaccatgaagaatgtgacctacaaggagaacatcgccaaatgtgagtggagctcagtggattggccactatgacaggtgttgtctgggggtgacctatttatccgtgtgaagtcccagtaagtgaaggaaaggacagtaggagtcaccaagcacctgccctacatcaagcagtgagcaacatgctttcacagcagaggaaactatggcttaggaactgaggtgacaggcctgaggtcccacagcaagggcagaactggaacttgaagtccatttcctttgccagctccacaccacctcagaaaagctcaacagattctagaggattccctctacatgctttgttcagattcctttagtcaataactctaggggccaggcatggtgtctcaaggctataatcccagcactttggggaggccgagatgggctggtcacttgaagccaggagtttgagaccagcctggccaacatggtgaaaccctgtttctactaaaaataatacaaaaaaagtaggcatggtggctcaagcctataattccagccaagattgcaccactacactccagcctgggcaacagggagatagtctgtctcaaaataaaataactttagggagacgacaacccgatttgaaggaagatgtgggacccacatagaacagatgtattcactcaattagtccctactgtacagcaggccccatttcagggcactggggctgtagctcttgaacgggcagtgagcttgcatgatgctctgattattaagaagctgtaatgttttttccaacccagccatccttcgttattctaattactccttacatatacttttgtatatctctgcttctctcttctcaccctcccaccacattaattctgagcactatatcttaatactctaggtatgattaccccaaagaatcaagttaacttaccacctcccacattctaggcactatacattcattcatataaccatgttttgctgggattatctgggggatgcagaaggggctttataattagcaatgccccttactttgacttgcccatcgaatccctcaaagcatacttatcattagtaaaaaaaaaaaattagaccatcgacagcatggtctttagagacagaactgggctgagtctacccctgaacagttgtgtgatttttaaagccatcacttcatcttccagcctcatgcgatcccactgattatgacatagtttcagtggtgccccttgctgcgaaggaggctgagaagggctgtcttgatttggggctgccatctgttaaactaacaaccaggaatctgtttgtaggaaagacaggatctgggggaataaataacaatctgtagccgtggtggctccatgccctcctgacaagattctttgtggtctttcaggccagcatatctttgtgaatttccacctcccggatcttgctgtgggcaccatcttgctcatactctccctgctggtcctctgtggttgcctgatcatgattgtcaagatcctgggctctgtgctcaaggggcaggtcgccactgtcatcaagaagaccatcaacactggtaggtacactgccctcacttgtaggcctcacatgtagtcactgcatggggtgtgggggtcctttagattcccatctagcaatggcctctgcatggagtttctctctcagattggatcagcaccagaagtgaggatgtcattcacctggaaatgttcttggcatcctgggtggggtctagggagcaggcccaagtttccattgcatcttggcaaggtcctgagcaggagttcatatctagagagctgtgagtcaggccttccttcttagcgggtttcctgtatgctcagagctttactggctctgtcaagaccccttagaaaaaggaccccaggtgtctgccctcgcccccacctcccttcactcttgtaaaggaaatgtgatgcataaatacatcagcatctagaggtggccaatgagactgctggctaagaggatttcctgccaagtagggtgtcctggccaatgagagctcgctaagccaatgacatcatcacttcatgaaagctcagtgaaatatagccaagaaaattcgccccccaccccagattgtcttggggaacagagcaactctgggtgcttctgggaaatgcagggcctgatccggtgctagttgggtggaggactcagttggcaggcatgttccaagctgctacagtttcttgatgctctttaaggcagaaatgaaggttgaaggtcaaatgtgggtgctgacaggagaccagggcaggcgaggaagcatgctctcagcactttctggaaggagagtggttacttgggtgggttcactctttctaacctgacctccagggaatctgtgtttttgttttcataacacttacctgtatccttggtttttccatctgaatatgcggagcaaaagacaatggggaatgaaactggattctaaaactctactctgtaatctgagaccatatatgggatgatgtacaacctcacccctaagcccagcccctaccccaggccaccaggccataccttccccggagaggccatgacatctcttccttctgtcttccagatttcccctttccctttgcatggttgactggctacctggccatcctcgtcggggcaggcatgaccttcatcgtacagagcagctctgtgttcacgtcggccttgacccccctgattggtgagttacaccctggcttctccctctggccaccactgccatttcctgtcatcccatggggctgatatgtttgtgttttgtgtttcccccaggaatcggcgtgataaccattgagagggcttatccactcacgctgggctccaacatcggcaccaccaccaccgccatcctggccgccttagccagccctggcaatgcattgaggagttcactccaggtcaggacttggggcacggggacaggggccctgggagtgggaccacccatggtcttgcaaactggtctctaacaagagccaggcttttctctgtactatccaaaatatggaactaatatgtggaggggaagccacgggtaaagttttcaggaccttgatatgagaacaatcaaaactatcagttctgagagaagcagtaagaccctcataactggtggttgtttcagcaaaagtggggtggccccttgatatagatgtggaaaaggtacttaggaagcacagacaccacctcccatctcctcactgcctcctatggggaactttacaattaggagaactccttggcatggaccatctatgttactttgtgcaagacctttgggatttgaatttatttatttatttttattttatttttttgagacagagtctcgcactgtagcccaggctggagtgcagtgatacaatctccactcactgcaacctccacctcccaggttcaagtgattttcctgcctcagcctcccgagcagctgggattacaggcacctgccaccacacctggctgattttttgtatttttagtagagacggggtttccctatgttggccaggctggtcttgaactctggacctcatgatgtgcttgccttggcctcccaaagtgctgggattacaggcgtgagccactgcacccagccggggatttgaattcttatctcaccatttacatactaagtgacctttggcaagtgatctaacctgagcgtcaattccctcatctgaaagatggaggacataacccctatctcattaggattattataaagatctgatgaggcaaagccatctgtgcaacagaaatagaaattcaggcatctaatataaattaaccgcatatgtcatcctaaaattttttagtagatacatttttaaaagtagaaacaggctgattcattcttcaataatgtatttgatctaaaccattatcactttaatatgtcatctgtcaaaaattgagagtctttgaaatctggtgtgtatttcatacttaaagcacatctcagtgtggacatgcggctagtgtattggacagtgctggtccacagcctgggcatggaaattggcaccttgggaaagtgaccaagcgcctggcctctggagccaggctcccaggatgtgaatttccacctcttccatctcccacctgtgggacttgaggagcctccattttctcatgtcaagaaataatggttgccactctgtagagtgttttttgagaattgagataatgcacagttgagtgctcctggccctcccagacacatagtaggtcctcatggaatccaggtaccctctgggctgagccataaggacaaagaaggcctggaaggcccgagactgtgctgcctgtgatgcctgctagcttacctccccctcctcctccctactgccacccgcattgggcaacaggcccctcacctgtccaacctcttgtgttgcagatcgccctgtgccactttttcttcaacatctccggcatcttgctgtggtacccgatcccgttcactcgcctgcccatccgcatggccaaggggctgggcaacatctctgccaagtatcgctggttcgccgtcttctacctgatcatcttcttcttcctgatcccgctgacggtgtttggcctctcgctggccggctggcgggtgctggttggtgtcggggttcccgtcgtcttcatcatcatcctggtactgtgcctccgactcctgcagtctcgctgcccacgcgtcctgccgaagaaactccagaactggaacttcctgccgctgtggatgcgctcgctgaagccctgggatgccgtcgtctccaagttcaccggctgcttccagatgcgctgctgctgctgctgccgcgtgtgctgccgcgcgtgctgcttgctgtgtgactgccccaagtgctgccgctgcagcaagtgctgcgaggacttggaggaggcgcaggaggggcaggatgtccctgtcaaggctcctgagacctttgataacataaccattagcagagaggctcagggtgaggtccctgcctcggactcaaagaccgaatgcacggccttgtaggggacgccccagattgtcagggatggggggatggtccttgagttttgcatgctctcctccctcccacttctgcaccctttcaccacctcgaggagatttgctccccattagcgaatgaaattgatgcagtcctacctaactcgattccctttggcttggtggtaggcctgcagggcacttttattccaacccctggtcactcagtaatcttttactccaggaaggcacaggatggtacctaaagagaattagagaatgaacctggcgggacggatgtctaatcctgcgcctagctgggttggtcagtagaacctattttcagactcaaaaaccatcttcagaaagaaaaggcccagggaaggaatgtatgagaggctctcccagatgaggaagtgtactctctatgactatcaagctcaggcctctccctttttttaaaccaaagtctggcaaccaagagcagcagctccatggcctccttgccccagatcagcctgggtcaggggacatagtgtcattgtttggaaactgcagaccacaaggtgtgggtctatcccacttcctagtgctccccacattccccatcagggcttcctcacgtggacaggtgtgctagtccaggcagttcacttgcagtttccttgtcctcatgcttcggggatgggagccacgcctgaactagagttcaggctggatacatgtgctcacctgctgctcttgtcttcctaagagacagagagtggggcagatggaggagaagaaagtgaggaatgagtagcatagcattctgccaaaagggccccagattcttaatttagcaaactaagaagcccaattcaaaagcattgtggctaaagtctaacgctcctctcttggtcagataacaaaagccctccctgttggatcttttgaaataaaacgtgcaagttatccaggctcgtagcctgcatgctgccaccttgaatcccagggagtatctgcacctggaatagctctccacccctctctgcctccttactttctgtgcaagatgacttcctgggttaacttccttctttccatccacccacccactggaatctctttccaaacatttttccattttcccacagatgggctttgattagctgtcctctctccatgcctgcaaagctccagatttttggggaaagctgtacccaactggactgcccagtgaactgggatcattaagtacagtcgagcacacgtgtgtgcatgggtcaaaggggtgtgttccttctcatcctagatgccttctctgtgccttccacagcctcctgcctgattacaccactgcccccgccccaccctcagccatcccaattcttcctggccagtgcgctccagccttatctaggaaaggaggagtgggtgtagccgtgcagcaagattggggcctcccccatcccagcttctccaccatcccagcaagtcaggatatcagacagtcctcccctgaccctcccccttgtagatatcaattcccaaacagagccaaatactctatatctatagtcacagccctgtacagcatttttcataagttatatagtaaatggtctgcatgatttgtgcttctagtgctctcatttggaaatgaggcaggcttcttctatgaaatgtaaagaaagaaaccactttgtatattttgtaataccacctctgtggccatgcctgccccgcccactctgtatatatgtaagttaaacccgggcaggggctgtggccgtctttgtactctggtgatttttaaaaattgaatctttgtacttgcattgattgtataataattttgagaccaggtctcgctgtgttgctcaggctggtctcaaactcctgagatcaagcaatccgcccacctcagcctcccaaagtgctgagatcacaggcgtgagccaccaccaggcctgattgtaatttttttttttttttttttactggttatgggaagggagaaataaaatcatcaaacccaaaa

SEQ ID NO: 71 - DNA, 1660 bp, Homo sapiens
cagaggaaagctgaggtcaaggaagttaaataaatggtatctgagaacctacctctggtgatggtcatatcggtgtctccgagggtcgtactcgccccccacgtccaccacgatgtcacaggaagcgagtttttcgggatcccgggtccgcacaatctctgcatcctgcgaggtacacaggggtgaaggggctgccgggtgtcgccgggtaggggattaatgctggacttcagggaggcaggaagggtaggaagggtgcttgggctgccgggcgctatcggagtgaccctgttggcggaatgccatccaccccggaggcatgcatgcacgcagtcccagggtcacttttcgcggaccgtacccggtactccggcaggaggcgaagcagtgcgcatgccagtgcctcgtcgcagtggaaggtgccattgtgcgtcccgattcggggcggtgccatgagtttgctgcgggatcgttttgggggcgggacggactctggaccgagcatgcggtgccgggtatacaggggtggcggcggcagcagcagcgttaagaggccgcgcaggaattggtgtcccataagcagctccctgcagggaggcaggagcgccgacccggaagaggaagcgccagcgcagccccacttccgcttgccaaccgttcccttggcaaccagctctgcagagtgagcagcagcagactcccagcctaggatttcttccagctggtcaaagggccctgcgatggagcctccaagaggcgcatcgcatcacccctgcgcatcaggctctgagacggggcccacactctcgaccacaccccccatctcatcaccagtcccttgcttaatccaagaaaagaccaacattctgcccagctggcacatttattggcattaaaacacaagacccttcccatcaccaggaagccacgcccaaagggtgtccctctgccccatttctgcaaaaactctcaggccttagcagtagcctgagctgcccccagggctgtgagctgctgaatcttctgactcatcatttccatgacggctgtggaaaaaaataagagtcaaaggttagaagcaaaaaggagaacctagagttaaggagaagtgacaggcaagtttaaggacaggcgaccgactaactacagtttgttaataaccttttttttttttttttgagacagaatcctgctcttgtcaccgaggctggagtgcagtggcacgatcttggctcacagcaacctccgtctcccgggttcaagcgattctcctgcctcatcctcccgaacagctgggattacaggcatgcaccaccatgcccgggctaactttgtatttttagtagagatggggtttcaccatggtggccaggctggtcttgaactcctaacctcaggtgatccacctgccttggcctcccaaagtgctgggattacaggcgtcagccactgcgcctggcattgttaataaaactttaactcagtgatccactgtggggtcactaacacaaatttagggtctacaatgcatcggtcaatatgctaacacagctgggtgtggtgagaatgagactcttctcggaaaaaaaaaaaacctgctaaccaaagatataaaaacgaacacaatatggtattaaatgagtctgacataatcagaaaa

SEQ ID NO: 72 - DNA, 41013 bp, Homo sapiens
gtcacatgtgtcggtgccacagactgagtcacgtggacaaggagcgggtgtgcatgctggggtggtgtcggcggctggcgtccttgcagccagcccagctagagtaagtggaagagaggacagaaggtgagatggatgcagaggcggccaactgtaaaggggagctgaaaaggtcagtcgccggaggggatgtgaagctggcagtaggagactgctaggcgccaggaaccaaggctcaagcttaggtctaagcatgaactggagcaggaacgcttcgccctttggaatgtgtgtggacaagaatgtgagcaggtgggtttcatgatgggaagagacgctttagctgcgtgcctgcttctcagcttgcagactatttttctgcctcccctgtacccaggtgggactgcgttgcatgtgagcagaagtgataggtcaactctaaggaaggggtgtgcccttccctttccctctatccactgggagaaatactcagtagactgggggctgatgaggacagcacactagggccttgctaaaagagtggtctgtccactgctttgacttcatcccagggcttgttagaaatgcagatttactgcacctgaattctcatttcgtcaagttcctcaggtgatttgtatgcacatcaaagcctaaggagcactgctataggggaaggatcagcagattatggcctgtggcctgctttttgaataaaattgtattagaacacaaacactcagttacctgcaaatacagagttttggcaggcacagcctaaaataattactctctggccctttacagaaagtttgccgacccctgctccaggttagagaagagcaacaaggtaagtacctgggccttctaaaccagagaggcccttgccattctaagccctgggctcctgccccggggactgtgaaatggaagagaaatagattgtcttgtttgaactactgttggggatctgtgttgcagtatcacaactaatacagccttgtctgcttgtctgagtgttgtctctagtactcatggtggtatctggtgtacagtagtgtgtgtgaaggaaaaagtatggggaaggatacaattacccagtggttaaagaaacgagtcgttttttctgagacagagtctcactctgttgcccagggtggagtgtagtggtgtgatcatggctcactgcagcctccaactcctgggcttaagtgatcttcccatctcagcctcccaagtagctgggattacaggtgcaagccatcacgtccggctaattttttatttctgtattttttgtagagacggggttttgccatgttgccaggctggtcttgaactcctgggctcaagtgatctgccctcctcaccctctcagagtgttgggattacgggcgtgagccaccttgcccggccagaagtgagttttaattactagagaatatttcaattatcctatggttgtgagacgaagtaccacaggcaaagacaggactacagtccttacaatgtgaactttcacacaccagtcaccatgtatagacatccacgtgatgattattacacactggattatgctcatgctgggggaaatgagaaccacctgagtaataaaggaggcggggagaaaaaccactgctggtttctagaactttccattttagtagaggctccattaaacagcatattctttggggccaggctgcctggattctaactccagcttcaccacatacttaacctctccgtgcctcagtttcctcttctgtaaaacggggatgataatagcaacatacctcatgcagttgtgaagtttaatgaattagcgtttggatggtgtttggcacatagcacccctaattgactactcttattgaaactgaccaaattttcccacaagcggggtgcccatagaactgaagcttgagaacttacagtgaaacgcactgctacctgctgaccgactcctcttccttacccctctctaattcccatttccccacagtggttacaatgagacactagactcctcattcaactgtctgctcccttgccccgcctgttttccttccttgctatataaatccttaactttaggcttggggaaggaacggattggaggtttggcttctgtttcttcggctgacatcacccgtaatgcaataaaggcttcttccctggcaacgcttgtcatcttagcgattgcctctctggtgagcaatggggcctagactgaactggtgtttcggtaacattattgttccataaaattgctatggtcaatttaaatgaaagaacatgaaacaacaggaaaaatataaaattgggcctcagtactggtgggggcaagtgaggcaggcacttttatacattgtgggatgggattataaattggttggccatatatgtcatgcaccttaagaacttccaggaagtaacttctaaggaaaatagcaaaagatatgcacaacaattaggtattagtgtttttttaaatgcattcattattgtaactaactttctcccaaaatagatttatagcatttaataattaaaacacatacaaccaaaacattgggtagatataaacatatttaaaaaattactagtaagtatgaaaatcaaaaacacaattcctaaggtggtgttttattttccctccattactggctctttccccatttggaagcttccttcatgttttttgaagctgagcaaggatgacatgactcatgtcatgtatattatacaatgtaaagaacaaaactggctgtgcggtagctcacacctataattccagtgatttgggaggccatggtgggaggataacttgaggccaggagtttgagaccagtctgggcaacaaagtgagaccctatctctttaaaaaaaaaaaaaaaaaaaaaaaggaaactaaaacaaggccacattgatacattgattgggcactctggacagaaaaaaagtgattgtactgatgtgtaattgataggtatgcttgataaaaaaaaaaaaggattccatttttcatgactttttaatgcgctacatgattctgtgcatgactttcagagcacaatgatcatgtctacttgatttccttcaaaaattaaaagaaaaatcttttacttgagagggtgaggtgggaggattgcttgaggccaggagttggagaccagcctgggcaacatagggagactttgtctctacaaaaaaatataaataaaaaataaaaagagaaagctcctaagacttcactcagtaggttatcctactaaaataactggttactgatggtttcatgcagttcacaaaattaactgatgattttagttgcagcttttatcttcctgacttctgccactcatgtctctgctttcacttcctgtatccgcaatctgactgtgatatgtgattattaaaggtatagtctatgttgccccctagtgattaatatgaacataggaaaagtcctgtagacttgctcagctattcagagctgtggatatgcttcttatcatgcagaatctacctactactttccatcattttattgtttaagtcctttaatagcgtcaatttttacattttattatgttattacacaagtccaagctaaactgtttattctatataaaagacaagcaaaaaccaagaaaacattataatcaataaaatattatcaaacaagaaaaagaaatacacctccttttaaaatttatttctaactctatttttgtggagtgcttttaaccagagaaataattaacctaaatgcatggtctattaaaagttaatcgaccaggcatggtggctcacgcttgtaattccagcactttgggaggctaaggcgggcagatcacttgaggtcaggagtttgagaccctcctggacaacatagtgaaacctcgtctgtactaaaatacaaaacttagctggctgtggtggtgcatgcctgtaatcccagctactcgggaagctgaagcaggagaattgcttcaacccggaaggcagaggttgcagttggccaagattgcgccattgcactccagcttgggtgacagagtgagactccatctcaaaaaaaaaagaaaagaaaagaaaaaatcacttttcttactttagtatttcctgaatataaagaatgacaggcaggattgaataccttgtgaaaaagtctgagataatgcacagtgatgctgtctatgtattaagtcttgtgaggccttcatctataagtttttccttacccctttggtgggccccctcagcccagctttttttttttttaaaggacagggtctcactctgttgcctaggctggagtgcagcagcacaattttggctcactgcagactcaacctccagggctcgagtaatcctcccacctcagcctcccaagtagctgggatcacaagaatgtgccaccacacccagctaattccttatttcttatagagacagagtcttactatattgcctaggctggtctcaaattcctgggctcaagtgatcttcccacctcagcctctgagtagctaggactacaggcatgcaccaccatactcggctaatttttgtattcttactgtagagacatggggtctcactttgttgcctaggttggtcttgaactcctgggctcgagtgattctcctgccttggcctcccaaagtgctgggattacaggcttgagctatgtgcccaacctcctttgattttttgtttttcttctgtttgctttactcataggaaaaaacatatacatttataaatcctgattcaaagactacttttgtgtgagggtattgagtttgcttttttttctcctttcatctaggtcatgtggcctttgggagatatgtgtgtgtgtgaggggtaggatgtgtgtttaattttttaaatttatattttggtgctgtatgttgtgaaagatttgctcatagtggatcaatgaaccatcttttctaggcagttttgttgaaaatgaaggtttctctttgatttcaagaatgaccaaattaaaaaacaaaaacaaggtattaattttctattgctaccataaaaaattctcacaaacttagtggcttaaaacaacacaaacttagttttgtatatcagaaatctgacacctatctccctgggctaaaatcaagctgtggcagggctgcattcctttctggaggctctagggggcagtctgtttctgtcctggccttttctagctcctagaggccatccacattccttggcttgtggcctcttcctctgttgtcagagccaggaacgcagcatctccctgacctttcttccatctcacatccttttctctgaccacagctgggaaaggttcacttattttaaggactcctgtgattagactgggcccatcttaaggttcttaatttaatcacatattttattatgtagagtcacatattcaggggttccaggtattaggatgtggacccctttggggcaggaattataattctgcctattacaaatgatgtaagagcatatacagtacagtgtttaaaatagtaatgagttggaaataaatgttccaaaacaggaaaatacttaagttatagaacaaacaaatgttggagtactaggaagcctctaaaaatcattgtaagagaataacataggcgatgaaagaagtagaatacaaagtttataaacagtgtgatcctgtactgcatgtggggtggggtgatgccccactgggtgtgtagaattttgagtgattttcattttctttttttttttatctttcttttctggggagggggggtactgtctgctgtaagcatgtgttactactatcacatccatctcccccaaaacttttaattaaatcttaagggaaagtgtattttatttaatagtggtaaaaagtaagtatcttaaaagcaaatgctaaagtcctgataaaatgtacattatactataaaaggacataatctaaaggcaaaggcaaagggaaactttcagtaagcattccctaatagaagacctataaaatgaggtatgtagtaattacttgggctgggattaaagggacataagaatgtctttacatacaagtatagccaatatacaaaatgcacaacagtctagttaccattaatcaaaatggtgggcaagtactataaaagtcaccattaaaatacagccttattaaaatacatatatttatggaaacgaaaactgacatttcaaaataattatttctgtgtgccctagacatttgagcaatttaatacttctgctggagtacagagaggaagtcagtaagatggaatgtatttggatttcaagcagttatttttaaaggaaagctattactttagaaactaaaagcaaaacagaaaacaaaaactttaaccagtatcctttcatctagctaattagatgtttgttcattcactatagatatagaatttatttaaaacctcaaaatgattgaagtaacagactcagcactgtgactttgggattgagtaggctataagagtggggtgaaatatgaccattcattctataattcaatattaaaacaaattcctgcaaccaaagaaatagtagtactgggttaggccaggttcccaagttcattgtgtattctagatctatagtgctaataaagagaagacaataacttgtttgcctaccttatttcattgttaaaaaaaatcactaggtcaaaataatgggtcaagttgttgattgaaaaacccagaattgcttttgtatttgctgggataagctagatgtcttagttcattttgtgctgctataacagaataccacagactgactaacttctaaaaaacagaaattttcttgcagttctggagactgagaagtccaagatcaaggcactctcatctggtgagggccttcttgctgtctcatcacatggcagaaggcagaagggcaagagcacaagagagagaacccattccagagagtgcttttcataatggcattaatctattcttaagggcggagccctcatggcctaaacacctcccattagacctcacttcccagtgctgttgcatttgggattcagtctctaacacatgaatatctgggagacacattcaaactatggcactaggttatgctgtagtaacaacttattcccttaacaggcacagatgatggtccagggcaactgtcccctggtgtgaatcagcaattcaggtcacttgactcttgtgactgtggcatcacagggagacaagaggtctccctgttttcaactacagcagaaagcacgaggagtatgcagcccacctattctatgcttggcccagtggtgatacacagtacctctcttctgcttacagcacattggcctgaaatggtcgtgtggtcccactcaagggggaaggaggctgggaaatggaagcttctatgtgtcctgaaaagaaattataggcatactgctgagtgctacttatgtttaaacacacctatacaattttggagaagctttcctttattttttatccagttggaaagactctgttctctaaacttcagagctgcaggtaggacctggtcctcattctagagaaagtagctctgcagtcccagcagaaagaagcctgacttgaagctccaccactttggctatctgttgggtgttcttcaaaagtgagtgccaattcactgtagtacccggcacttggtcttccatgctttcattattagggaaactagatttgtagcacagctactggagagtactaggatcctagtaagctggctttacaaacatggtgtgtactgcctatttttgcttttatttcagagaaaataaaacgtaagataataggaacaaatacatgtgaactgctggacggctattcaaaaatagtttgccagagtaactggtaagcctgaaatctgtgtagccatgaaagggctcatcatcggcttaattctgaagcaaaacttggtgaaacacgtggtggttatcttggaggtaaaatgctggcttcccagtgggaagtgaaagtgtcaatcaggttgtgttgggagatgtgataaaggctgaggcagtcttgcagctcatgattttatgcaggggctaagatgagaaggatgttcaaaaaaaccaggggatgttattctagcttttgagcatgagacagcctcaaagcactgggaaagctggatgctagcaggaggcagtagaaatgcaagtgtgagaaaaataaaggctgggctggcgtgctggcaggaaatggattcgaaaggcaggtctgataaatgtttcagaaaaagagagctgtcaggatgaggtagagtgagcttggcagcctgggagttggcatgccattgatggtcaagaccaaatgctgtttctcctatccagccagaaattttgctttagaaatgacactagggctttgctctcaacaaccactgtcctctctctcattctccctctcactgggttacctcctccttgtcagtgacttcttctgtgatactgactcttccatccatcatgggttttttctctgatttttaagaataagtggaaattcctatattgtttgttctttcaattgtagaaaatattgaaaaccaaaaggaaataatttaaaaacactgtaattgcactacgaagaagcacttagtttggtatacagccatgtgttgcttaatggtggggatatattttgagaaatgttttattaggtgacttcatcactgtacagatatcatagagtacttacacaaacccagattgtatagctgactacacacctgtgatatatggtatagctgagtgctcctagtctgcaaacctgtatagcatgttactgtactgaataaggcaggaaattgtaacacaatgggaatcatttgtttatttaaatatatcaaaacataaaaaggtacagtaaaaatgcaatataaaagataaaaaatggtaggtacccgtgtagggcacctaccatgaatagagcttgcaggactggaagttgctctgggtgagtcagtgagtggtaaatggatgtgaaggcctaggacacggctgcacactactgtacaattcgtaagcactacacttaggcacactaaatttataaaaaatatttttctttaataggaaattaaacttagcttactgtaatttgttactttatgaactttttaacttttaacaacttttagattgtttttaagcaacatttagcttaaaacacaaactcacgtacagctggacaaaaatattttctttttaaatatccttactctataagcttttttcattaaaaaattatttttacttttaatttttttttgttaaaaacaaagacacaaatatacacattagcctgggtctacacagggtcaggatcatcaatatcactgtcttccacctccacatcttatcctgctcgaaggtgttcaggggcaataacacgcacggagctgtcatctcctatgataacagtgccctcttctggagtacctcctcaaggaactgcctgaggctattttagagttaacttaaaaaaaataagtaggagtacactctaacaataaaaagtatgtaaatacataaacccagtaatagtctattatgattaagtgttatgtactatacataaatatatatgctatactattgtaagactggcagtgcagtaggattgtttacgtacagcgtcaccacaaacatgagcaatgcattgtgctacaacgttctgatggctatgacatcattaggtgataggaatttttcagttttgttatgatcttatggaacaactgttgtatctgtggtccattgttggccaaagtgtcatcaggagttgcatgactgtatctccttccagacttgtgtttatgtgtgtgcttttacaaaaatggaatatatacactattctaggaactccttttctcatttaatattctgtgaaaagctagacttatttatgaatgcttatgagatgttttactggcatttcacactcaatgtgacaacaccatccttatcatttctaacctatacctcatttttttcatttttcatttcattaactttttcaacatcttttgagcccacagtaggggtctaaccacttgataattgtcttagtttattttctgttgctataacagaataccatggactgggtagtttataaagaaaagaagtttatttagctcatggttctggaggctaggaagtccaagagcatggcaccaccggcatctagtgtgggtcgtcccatggcagaagcggggaaggacagaaggtggaagcaagtgcacaagacagagagaaaattgggtaaaattcatcctttttataaggcgcccactcctgtgataactaacccactttatgataatgacattaattcattaatccatataatcacctcttaaagttcccacctctcaacactgttacaatggggattaagttttcaacacaaatttttgggaggacacattcaaaccatagcaatggttaaaattaagctcagatactctcttttttccctacccttctcatatttaattgtctcaaaatcactcattcattcaataaatatttttttcatctgtccttacatggcctgtgtgcagcctgtgccctcatgattttctcattcagtgaaattgagcacctactatgtgccagactttgtttttggctctgggcataccaaagtgaaccaaatggggaaggtaccttctatcatggtgctagtattctagagggggaataaataatacatcaatatattagctatccattattgcgtagcaaattaccccaaaacttagtgacttacaataatgacatttactattttactgtgtttgtgggttaggagttggggcatgctttagcaggtcctctgcttcagggtctctcacaggccgcactcatctcaaggctcaactaggggagaattggctttcaaagtcattcatgtggttgttggcaggattccatttcttgctgtgttggctacaggctactgccaatcctggccacatgcacctctctgttagggcagctcacaatagggcagcttgcttcatcagagtaagcaagcaagcaagagccagagagagagagagaacgagagggagagtgccggtaaaacaagagtcatggtcctttatgaccaatcttgaagtgacatcccatcactataccatatcctatttgttaggaacaagtccctaggtggcccattgaaggggagggtgttacacagggtttgaataccaggaaatggggatcattgtgagccgttttagaaggctgcctcccacagtcaagaaacaagacaattccagatcatactcagtgctagagagaaaataggacagggataagacgaagagcatctgggagtgttggggaggtagtcttcattgagtgtttagagaggacctcactgaggagataacagtgaagcagagaactaaagggcaagaaagggcccacccggaaagattcaagccttccagacagaggaaacagaaaaggcaaagtggcagaatgagctctgcctgtttgaggaagagggtggagcccagtgacatggagtgaatgagcacgaaggaagtgggcgcctgctgagatgaggcccgggtaatgagtacatgaagtgaatagtgtctgtgttttgaaatactgagtaacttccctatgtcacagcttgtaagtgacacagcacacacaaggatttgaacccgagtccatctgatgctaaaatccatgtttttgccacactagtgccttgcagaatttactagaaggggatgctgctgggtggtggtcagccactccaggtgctcatgatgtaagtaagactttcagggctaaaaccaggatagtcctgaggaaattgggatagctggtcacccacaagacacgacaggaacactgagttctctgatgtgatatgaaacccaggatgagccggcagccctgagtcagcctgatgagaagtcggctgtgccttttgttaccaagaaaacaaaactgtagcataaccccaccttgttgttaaaacaaaatgtttacattcttctgttctgcttcgctcaagtcattcctgtgggacaagccgacctaacatacaggtgtagtcaggggctaggagagacctaggcaggcccttgtccattctcagtcactgaagtgagacctagggactcaggaaggactcagagttcccttagtcatcattccctctgggcatcctgcttttggcataattactgatacgagcacctcgtgtcccctcctgaattatacctacccccccgcctccccgccccctgcaattgcttagcacagtatctggcccatggaagtgacttcatggaaattcagcggatgaatgactggacaatgaacaacgcacagcaatgtgtggtgtgacagaaaaggctgcaccagcaaaaattggaagctgatctttgggtatttccttgccttggtcactttgcaatttcctgggtgcttgaaacaggaagtcagtgactctaagcccctgtgggatctggcacctcacatcaaggtatctggaaagtccttattcttcacttctccatgcgatcctaccctacagaccagccctccttttggaatctctcctgctacacattctgtgaccctgggactctctcttattttatttatttatttttatatgcccgtgtttccaaaggaataatagggcagttaaatatagctatgactgtgcctttccagagcccagaaaagtctggaaaactgggaatatccaaagctcaggatgatattgcgcacacaaaaagtactaggcagagtagtgtttagatagaaacagagtaatgtttagatagaaagcagactcagtcatataaaatatatgcatatacagcatgatctgcatttctgtgatgcttctgaagtacagaagcattcagcacttcagtaactcttattgcaagttacctcttcaatcatttttcttcaatcattaaaatgctttaaaaaattttttagcttattgaggtatgactgacaaaaattttaatatatttaaagtgtacaacttgttttgatatatgtatacattgtgaaatgattaccacaatcaagctaataaacatgtccattatctcacgttacattgtgtgagaacacttaagatctactcttagcaaataccaagtatttcgagtatatcaagtatgcaatatattattactatacactcaccatgctgtacattagagcttcagaacttatttatcttataactgaaagtttgtaccctttgaccaatgtccccatttccaccattcctagtgaccactgttctactctgtttttatgagtctggctttttttagattccacatgtaagtgagattatacagtatttgtctttctgtgactggcttattttacttagcataatgtcctgctggttcatccatgttgttgcaaatggcaagatttccttatttttttaaggctgaatactatttcattgtgtagtatacaccacatttctttatccattcattcattgatggacacttacgttgattccaaattttggctattgtgaataatgctgcaataaacataggagtgtagacagctctttgacatattgatttcattttccctgggtatatgcctagaagagggattgctggatcatatggtggttctggttttaatattttgaggaaactccatattgttttctatgatggctataccaatttacattcccgccaataatgtataacagttccctttctccacatccttgccaacacttatcttttggctttttggtactagccatcctaacaggtatgaggtgatgttttattgtggttttgatttgcatttccctgatgattagtgatgtagagcacatttttatatgcctgttggccatttttatgtcttctttgggaaaatatctattcagattattttcccactttaaatccagttatttgtttttttgctattgaattgaattttttatgtattttggatagtaaccctttattatatataaggtttacaaattttctcccattctataggttctttttttctttattttactataaagtttaaaatcttgttttaatttttgtgggtacatagtaggtgtatatatttatgaggtgtgtgagatgttttgatacaggcaaattgtgtcacagaaaatcccctcaagcatttatcttttgtcttatgatacaattaaactcttagttattttaaaatgtacaattaaattatcgactatagtcaccctgctgtactatcaaatagtcggtcttattcattctttctaactattttttgggtacccattaaccatacccatccccccgcctcccccttacccacctctataggttcttttcattttgttaatttttttcctttgctgtgcagaataaaatgctttttcaaagcaagttaaagctgctctctacttagattaagaaatcaacttaaagtattatatatatatatatatatatatatattaaaaaaaaaaagaaaacatctgaagtggctccagcagaaggaaaggcaagatgggaatcaaagtttaatctacattctttctgcttctccttttctaccaacactgtgttcaactgcataacaatagtaccaatgagcacgagaaagatagtttttagtttaaagactatttcagttttagtcagactacttcagacctcagactccagacttcagactccagactttagacaacagactccacatgccacacaacagactttcagactccagcttcagactccagactccagatcgcacacttcagacaacagactctagacaacacactccagtctccacattccacacgacagactacagactccacactccagacaacagactccacactccagacaagagactccacaatccagacaagagactccacactccagacaacaggagacttttagactccagatcagacttcgaacttcagattcactccagacttcagactccagaccagacttcagactccagacccagatttcagattttagacttcagactccagaccagatttcatatttcagactccagaccagacttctgacttcagacttcagactcctgaccctggatttcagactccaggcttcagagtttggactttggactacttcagctttagtcagacagacaacttcagtcacaccacttttcacctctgccatctaatctcgtcttttgaacaaccccctaaaaaggtaacattcccaagaaacccagacccagaaacactgaatgacatactcaagactacccaactagtaagggggaggccacagtttcccttaccctggcaacatgcacatggcaggcccttcacttagctggtagaaggaacacaggcttgggaaggagatgtctgatgttcactccctgacgacactcttacttgcttcaatgatctctctgagccttgggtggcccatctgctaaacaaggatgagttatttcctggggatgctaagagacttctgcctcatgcctgcagtgctgctcatgttgcccccttggaattacttgttcaacttctttcttccccactagactgtgagcttcttcaggtcaaagaccaggactttcttgccattaaccccagcaactagcatcatgcctgaccaaagggcatgctgatgacaataaacattgattgtccgaaatcacatgcctggtccccagtaggcgcttgctggttactgctttcttcccatcctccctctgccaccccttcctctctgagtctggaggggatggccatgtactagccaggggcagtgtccacaggaaattcaggtcctttgcagcagtcagtttcatttcctatgattaaaatttctgtgaaacatattatgcaagagcagaattttaatgtagttattccctggacggtctgggcaagacagacctaccctgtaccagttcctggcacagctggtgttggcccagttacgcaagtttctgaggtttaaaacagaacaacaaccttccagtgtttctttcaatgccaaagcaaactttctcagcagagcggtccctcattcttggaaaagagaggaatgtccttttcttttccctgtctcctcttctctgatagaaaagtgataatttattattgagattgcagattgggcctcgacccctcctttgacaaagaggcaaaacactcctagaaataaagttttcattaatgcattcctctctcccctttctctgtcccctcctcccctttcctgttctctaggtctctgcttctaaatgtatccccaacttctttccaaatacttcctcctgcgctgtcccacctgaacctctgctacgtaatgccctctgctccctttttgccatcgatagtctcatttcctgagagacactgagctcatctagttggttagaggaaaacattatgattgatctaattcatattaaagtgtgaatgactgacagcccaatatatttacattacttcatataattgcctttttaccaaaggcgcttattaatccaagtaaacactttccacatagaattcccctaaagagttttgggctagttattcctctgcgtgtccctcagggaatgactatttcttcataacttctgtctttcttttcaagagtaaaatgaagggaaggtcagtgatctcatattgggtctacactggggattatgccctcagtgagctagagatgggacaagtttagggactgattttcttagaggcaatcattacctggtattttcctgtcaattgaattatgatcttagaaacaaatgcttttaaacaaaaggtcagctaggtatggtggctcatgcctgtaatcccagcactttgggaggccaaggcaggcagatcacttaaggtcaggagttcaagaccagctggccaacatggtgaaactccgtctttactaaaaaaaaaaaaaaaaaaaaaagtacaaaaattagcctggcatggttgtgatggttgtgcacacctgtaatctcagctacttgggagggaggagactcgcctgaacctgggaggtggaggttgcagtgagccaagattgcaccactgcactccagcctgggtgaaagagcaagactctgtctcaaaaaaaaaaaaaaaagaaagaaaattaaaaaaataaaaggtggaggaaaattttcatattgtttttctcttataatttttattctttgccaatacagctttgaaactctgtagtttccttagtaactctgcagtgtctaaaagttcctcagtcaactgacgtataactcctctttcatgtcattcaccccataattatgtacttttgtcaacctatcattataattagtattcatatgcctaatgtttttgcatatctgttgtatagacaggcagctttgtttctccactcgattcttcttttttgattttttttaaacaaaagtttactcttacatgtacagcaggctgtaagacaacagttcattctaactataggtggcaaaagatgttatggcaggaaatgcagaggtttaaatagcaatggaatcaagggtcatcattgcctcagtcacaaggaacagcttttttttttcctcaggtttcttatttatttattttcaactcttattatagattcagggggcacatgagcaggtttgttacctggatatattgtgtggtgttgaggtttgtgttacaaataatctcatcactcaggtactgaacatactactcaatatttcgtttttcaacccttaacctccttcctccctgctctaatatccccagtttctatcattgccatctttatggccatgagcacaaagtttagctcccacttataagtgagaacacatggtatttggttttcagtctatgcactaatttgcttacgataatactttttgccagatttcttaattccacttgtggccaggagtcccttccctgtgtcctttgcttttagcccctcaagtttcttctgctcctctttttgcttctgcttggaatcctgtcttcctcctccatctctttggcttgtttcttggtctcttcttgccaccttgctgctctttccccagaccctatcaccagaattcattttttataaaacaaatatacttattcatttggctctacttaccaaggaactcatatctagcacttacaagcattaggtacgggcaggcggcaccgacagctggggcctgggtcggggacacgcggaggtcaggctggtgaaggcggcaggaagctggagcacgatcccagggggaacaatcctggaccttgactcaacagccactttgaggagtgaccagcctgcgtttcaaccaagaccaaaactgcttttgctgcgccatggagacaggtgtgcgcatctacaacgtggagcccttgatggagaaggggcatctggaccacaagcaggtggcagcataggcttggtggagatgctgcaccgctgcaaccttctggccttggtgggcggtggtagtagccccaagttctcagagatctcagtgctgatctgggacgatgcccgggagggcaaggactccaaggagaggctggtgctggagttcatcttcaccaagccagtgctttctctgtgcatgctccatggcaagatcgtgaccgtgctgaagaaccgcatctatgtgtactccttcccagacaatcctcgaaagctgtttgagtttgatacccgggtcaaccccaacaggctctgtgacctctgccccagcctggacaagcaactgttagtgttcccgggacacaagtgtgggagtctgcaacttgtggacctggcgagcacaaagcctggcaccatgtctgctccattcaccatcaatgcacatcagagtgacataacctgtgtgtctctaaaccagccaggcactgtagtggcctcagcctcccagaatggtacccttattcgcctctttgacacacaattcaaggagaaactggtggagctgcaccgaggcactgaccctgccaccctctactgcattaacttcagccacgactcctccttcctctgcgcttccagcgataagggcaccatccatatctttgctctcaaggatacccaccttaaccgctgctccgcgctggctccgtggacaaggtggggcctatgattgggcagtacgtggactctcagtggagcctggcgaggttcactgtgcctgctgagtcagcttgcatctgctccttcggtcgcaatacttccaagaaattcaactctgtcattgccatctgtgtagatgggaccttccacaaatatgtcttcactcctgatggaagctgcaacagagaggctttcgatgtgtactttgacatctgtgatgatgatgacttttaaggaccctgggagctgtgctagagacctgcagtggcagactgcagagctgagccttggcagtggggcatgcttggaagccactagccagcaagcattaatgcggctggtgcccactttccactcagcagagctatgtctaaataaagagctcacttccccccagcacttcttgatgactgtgtgccccaagggccaggccagagacccaggaaggcagagaccccttgggatccctaacctggaggaaattgccagggacccagaggaagtgccctaatccaacctggggattttttaaaagcttcctaggaagagatgatctccgatgtgatgaatatgaataaaaggcccttaatggcaaaacaaacaaacaaacaaacaaacaaacaaacatcaggtactgctggtaatttacatgtgccatctcaccaaattttcaaccctatgaagtccattttacagagataataacttgctcaaaatcatgcagttagcaagatggctcagaatctctattcataacctctatacatactgcctttgttatgtttcatgttatcagaaatgtttaaaaatcactttggaatgttatttatcacaacaaacaaaagttacatcatcctaagcttctaaaagccaatctgaacagtttgaccaaatgaaaacttaaggtagactaagaccccattgtacccaaccttgcatactcaaggttgatgaggtactattcctgctattctctagttacttggtgaggccatcactaatctcaacagattctggtggtttgaaggcagtggccacctgaatcaagaaataaaatgttgactacaagcagagcaagtaactgtatgatattcctttttccccaggacaaatgtttccactattttcattctgatccatcaacaatgtgattagacttcctggtcccactgaaaaatggaactaagttctcacagtttaaatcctaaggcctttcttgaaaataatagctagcactgaacatttaaccaggttctaggtactatattctggataagaattatctccatttaataaatgtgaaaactgagtcttgggagatctgctcagttataaagataacatgtggaagaattaagatttgaatccaagtctgtctgactgcaaaacatttgcccttacaaaccatggtacattgctcccataatgtggagggtgggcatgactgaatcgtgctgagccccaggaatcagtggacataaccttggatctgaggcacgtgggccacagttgatggctgccttgagacaatccagaagctgatttgtggcagtgattcatagtgtgtcctttagagcaggagtccccaaccccatggtactggtccatggcctgctaggaaccaggccgcacagcagggcatgagaggcaggcaagtgagcattactgcctgagctctgcctcctgtcaaatcagtggcagcattagattctcatgggagcatgagccctattgtgaactgcacatgcaagggatctaggctgtgtgctccttatgagaatctaatgcctccgaaaccattcgtcctcctccccggtctgtggaactggtccctggtgccaaaaaggttggagactgttgctttagagccagtatagcatattttaaagatactatattgtagtattatgcaataaataaatgaaaaattccaatgaagagttcttgctatgtcacaggtcagggatgatgatgatgaagatgatgatgatgatgatgatgatggtgatgatactagctaacaatgattgaattctttctttgtgtcaagcattctgttaagcacattatatgcataacctcatttaaacaggaaagaaaatcaactgtcctttgagtggtatccggtacttgagccattactcaatcatcgtttgacttccttcttggacttaaaatagtatatggcattgtttcaggcaagatttgttattgcttaaaattctcatatgaggcaatcgtacctgaattgtgcaatgcatttgggcaatatttgtatgaagaaaccatgtgacaaaatgggaacatgcacacacacatacaaaacaaacaacaataaaataaataaaaataaagaattcagccttttcaggagaatcgcttaaacccaggatgcagaggttgcaatgagtcgagatcatgctactgcactccagtctgagtgacacagcgagactctgtcttaaaaacaacaacaaaaaaattcagccttttgtattatttgagtgtttggttatgctctcatgaaataaaaagattatgaagaatgggaagttggtttatggaaatctagtgaaatgcatggcatgtaggctttgaaatcaggtggaggttccgatcctaactatgttacttggcaagtttgtgaactcttctgagcctccttgactaaaatgctgataatacctgctgcatagacttcttataggattaaacaaacacacttaaaacaactagaagagatcttagctcaagatagggtctcaatagaagtaattgacttccactccccaaccttaccctggattctacctgccaaactctacagtgtttactgacttctccttccttcaccctcttttctatgtcccatttttatagttttgtatttcctaattacttttatttactcatttatttgttcaaaggtatttactgaacaactgctatatatgaggtactagaataagcactgaggcggcaatggtaagctaaaccaaacagaattcctggttatggcctagtgagagagacaggcattaatcacacaagcaggaagaaagctaccagctgagccacatgctttgaaggaaaagatcacatctctaggctgaaaagtgagggaagtgaagttgggtgggagcctgaagagaatgagcgtggtctatgataggtggtgctggtgctagtggatgtggtggtgatggtggagttgatggtgatgatggaggtggtagtgatggtggagttgatggtggtgatggaggcagtggtgatgatggtggtgatggtgatgataaggtggtggtgaaggtggagttgatggtgatgatggaggtggtggtgatggtggagttgatggtggtgataaaggtggtggtgatggtggagttgatggtggtgatagaggtggtggtgatggtggagttgatggtcataaggtggtggtgatggtggagttgatggtgatgatggaggtggtggtgatggtggagttgatggtgatgatggaggtggtggtgatggtggagttgatggtcataaggtggtggtgatggtggagttgatggtgaggatggtggtggtggtgatggtggagttgatggtggtgatggtggagttgatggtgatggtggtggtgatggtgatgatggaggtggtggtgatggtgagttgatggtggtgatggaggtcctggtggtgatgatggagttgatggtgatgatgaggtggtagtgatggagctgatgatggtgatggaggtagtggtgatggtagagttgatggtaatgatggaggtggtggtgatggtggaattgatggtggtgataaggtgatggtgatggtggagttgatggtgatgatgaaggtggtggtgatggtggagttgatgatggtgatggaggtggtgatgatggtggagtcaatggcaatgatgaggcgatggtggtgatgatattggaggtactggtgatgatggagggaatgtggtaggaagtagcattcacaacagagggaacaatatattcaaagaatcagtagtggtggaacctctgcatgtctgagaagctgaaggactagtgtggctggcatgtggttggtgagagagaaggagcagagaccaaaaggaaagcagaaaccacaccacagaccctagagggccttgtagaatatgttaagcatttggatcctagtcctaagaacaactagatgccacagaaaagcttaaacatggggcgaggtgaggtgatcagatttgcattgtgaaaagatcattctaattctttatggttcaataatggtagctactagctacacatggctactgaacactgaaatattgctagttttagtagagatgtaaaatagacactggatttcaaagacttagtataaaaaatgtaaaatatctcattaatttaaaaatattaattatatcttgaaaaagtatttcagattaaatgtaattaaaatcaattttaaaattatttttaaaaacaattactaggccaggcatgatggctcatgcctctaatcctagcactttgggaggatgaggtggtaggattgcttgagcccaggagttcgagaccagactgggaaacatagggagaccctgtctccaataaaacaaaaaagttagctgggtgtggttgcacacacctatggtcccagctacttgggaggttaaggcaggaggatcactggagcccaggaggtcaagactgcagtgagccatgatcatgccattgtactccagtctggatggcagagcaagaccctgtctcaaaaacaaacaaaacccatttcccccactccccaaaaaaccaattacctgtttcttgataacattttaaaatacagctattaaaaattaaaaattgggggcagccatggtggctcacacctataatcccagcactttggaaggccgaggtgggtggatcacttgaggtcaggagtttgagaccagcctggccaacatggtaaaaccctgtctctactaaaaacacaaaaattagccaggtgtgttggtgggtgcctgtaatcccagctactctggaggctgagacaggagaattgcttgaactcaggatgtggaggttgcagtgagccaaaatcacaccactgcactccagcctgggtgacagagtgagactccatctcaaaataataataaaaaaattaaaaattgcatatgtggctcccattgtatttgaactagatggtgctactctaagtgcagtatggagaaggtgctacggagaaggcacagtagaggagaacatttaggaagttgtctttgtactccaggaaagagaggaggaggtagcttgaactaggatgacggcggtgggaataaaaagagttggatgaattcaaggtaaaatgagcacaactaagagctgcagcagatgcatctggatggatggtggagcttcatgttgaaataacaccagaaaaaaatcagccttggtgatatggtttggctctgtgtcctcacccaaatctcatcttgaattgtacttccataattcccatgtgttgtgggagggacctggtgggagataatttgaatcatgggggcagtttcccccatactgttctcgtggtagtgaataagtctcatgagatctgatggttttataaggggtttctgcttttggatcttcctcattttctcttgccgccaccatgtaagaagtgccttttgcctcctgccatgattctgaggcctccccagccatgtggaactgtaagtccaattaaacctcttttttttttttttccagtcttgggtgtgtctttatcagcagtgtgaaaatagactaatatagtaaattggtaccagtagagtggggtgctgctgaaaagacacccaaaaatgtggaagcaactttggaactgggtaacaggcagaggttggaacagtttggagggctcagaagaagacaggaaaatgtaggaaagtttggaacttcctagagacttgttgaatggctttgaccaaaagcatgatagcaatatgtacaataaagtctaggctgaggtgatctcagatggagatgaggaacttgttgggaactggagcaaaggtgactcttgttatgttttagcaaagagactggtggcattttgtccctgccttagagatttgtagaactttgaacttgacagagatgatttagggtatctggcagaagaaatttctaagcagcaaagcatttaagaggtgacttgggtgctgctaaaggcattccattttataagggaagcagagcagaaaatttgcagcctgacaatatgacagaaaagaaaaacctgttttctgaggagaaatacaagccactgcagaaatttgcataaataatgaggagctgaatattaatccccaagacaatagggaaaatgtctccagaggtcttcacagcagcccctcccatcacaggcccagaggcctaaaagaaaatggttttgtgggccaggcccagggtccccatgctgtgtgcagtctaaggatttggtgccctgtgttccagacactccagccatgactaaaaggagccaaggtacagcttgggctgttgcttcagagggtggaagccccaagctttggcagcttccacatggtgttgagtctgcgggtacaccaaagtcaagaactgaggtttgaggaacctccacctacatttcagaagatgtatggaaatgcctggatgtccaggcaaaagtttgctgcaggggcagggcccagatggagaacctctgctagggcagtgcggaagggaaatgtggggttggagccgtcacagagagtctctactggggcactgcctagtggagctgtgagaagagggccattgtcctccagaccctagaatggtagatctgccgacagcttgcattatgcaactggaaaagccacagacactcaacaccagcccatgaaaacagccaggaggggagccataccctgcaaagccacaggggcagagtggcctgaggccatgggaacccacctcttgcatcagcgtgacccagatgtgagacatggtgtcaaaggagatcattttggagctttaagatttgactgccctgctggatttcagacttgtaaggggccagtagcccttttcttttggccaatttctcccatttggaatggctgtatttacccaatgcctgtatccccattgtatctaggaagtaactaacttgcttctgattttacaggctcataggtggaagggacttgccttgtttcagataagactttggactgtggacttttgagttaatgatgaaatgagttaagactttgggggaactgttcgttttgaaatgtgaggacatgagatttggagaggccaggggcagaatgatatggtttggctctgtgtccccactgaaatctcatcttgaattgtactctcataattcccacatgttgtgggagggacctggtgggagataatttgaatcatgagggcagtttcccccatactgttctcatggtagtgaataagtctcatgagatctgatggttttatcaggggtttctgcttttgcatcttcctcattttttcttgctgccaccatgtaagaagtgccttttgcctccggccatgattctgaggcctccccagccatgtgaaattttaagtccaattaaacctcttttcttttccagtctcaggtatgtctttattagcagtgtgaaaatggactaatacacctggcaaaaatattttgagctcagattgggacatattgaatgtgcatgctctgagacaaatgtctcaagtaggcagttgcctatctaggtctggagctcaggtgagatatttgggcaagagatttaaattggaaagttattgggttatggacagcataaatgagattcattaagaagaaagcagccagtgagaagtggcctcggacctagacttgggaaatggggcagggaaggagataacattgaaaaagagggtttaaaggaaagactaagtatgtggtcattcaaggaaaaggagagaacgtttaagaaaggagaggccagctgggtgcgatggctcatgcctgtaatctcagcactttgggagtccaaggcggtgaatcacctgaggtcaggagttccagaccagcctggccaacatggtgaaaccccgtctctactgaaaatacaaaaattagccaggtgtggtggtgcgtacttgtaatcccaactacttgggagctgaggtaggagaatcgcttgaacctgggaggtggaggttgcaatgagccgatgagccgagactgtgccactacactccagcctgggcgacacagtaagactttgtctcaaaaaaaaaaaaaaaaagaaaaagaaaggagtggtcagtcacatctgctctgagaggttaagcaacatgaggaccaaaaaatgtctgggggagtgagaaatgcagtggtccctggtaacctttgcaagtgctgtttggatggagtgatgaggtggaagccagactggaatagagggaagactgggtaaaaggagaggagatagagacagtaggtacagaaaactctttaaaggtgttgcgctgtgaagtggagagagagagaaagagagaagtttgaaggagaccaaaaagattttttgctgttgttcattttaaaaataaatatggaaaacttgagcatgtgtgaatattggtaggaatggtctggataagatggaatagtagaacacaaaagaaaagagagggataataagcagagcatctagataacatctacataggacaagtgggtacccagcatccttggaggtcccctcttctactgtggtaggaaggtggagggggtgtttgggtataagttcaggtgtgggaagttagaatttctctagatggttttaattttctctgtgaaataagagataaagtcattcctggaaaggatgtgaggaggcagaagctgctggtggctggacaagagtggagtaagcttgagacagtgttgcaggaattgcaagagagctggctcaagaaatgcaataaagtacctggtctcctctaagaaggcatgtcatagggttcttttaggtttggggttttgtcacataggggcataaggagaagagacagtgatggctccagaatttctgtttagtagagctttagaagaagcaatctgatttggggataggagggcttgaagcatcttgtacagtattttacattaggtatattaagaaaacatcaattgttcatatagaagaacagggaagacataggaaaattgagaatgatgtaaagccctctcctgcaaccttgcgttcaccaacaccaccggaaagagtttctggttttggcaagggtgatatggagattctgaagtctgggagctcttccaaaagccagtaagaagggctgtgcactatctgaacttccctgaagtagttcattccagcactcctgggcagctggcattcatgttcagaccatctggtggccacactcaggatggattttttcccctataaaaaggggtcaggtctctctgttttgcaattagcaatttggggggccaagtatgactccccatagtatgctatgagaatgggaagcccagggatctgctgattcttctgctgtgaggtccaacttgaaccaagtatttgtctgagaagaatggaggtaacaaatggattggaaagaggagggatcagtggactctgatcaagatgcaggaggtttgaatgagtcgttctgaaggctgggtaactgtaggtaatgacaaagtccagggcgtggctgaaggggcatagaggagaagatccctgcagaggaggaggtaaaggaactgagcagccagggtgttgggtaggtcatctgtgggaacactgaaggcattgggtctcctggaagatcttgagaagaagaagactctgagcaggtcccaaagtcttcaaaaagtaagaggagtaactaggaggtcagcagatggtgacagaagttgaagggcatgaggacaatgtggtccagtggcatgagactagagcctcacgggaactggttttcttacaccatgttgcccaggctggtctcaaactcttggcctcaggtgatcccagaggggcctcccaaagtgctaggattacaggtctaagccaccatgccgggcctgtttttagttaatttttttttttctaagacagagtctggctctgtaacccaggctggagtgcagtggcatgatctttgctcactgcaacctccatctcccaggttcaagcaattctcctgcctcagcctcctgagtagctgggattacaggtacctgccaccatggctggctaatttttgtattttcagtagagatggggtttcaccatgttggccaggctgatctggaactcctgacctcaggtgatccaccctccttggcctcccaaagtgctgtgattacaggtgtgagccaccgtgccccgctatttttagtttttaaaggaacctccatactgttttccatagtggttttattaatttacattcctaccaacagtgtacaatggtaaggatgtggagaacatccttaccagctctgatattctgtctttttgataaaagccattctaactgtgtgagatggtatctcattgtggttttgatttgcatttttctgatgattcgttatattgaacattttttcctataccccttggccatttatatattttctttcaggaaatgtcacctcatatctttttccccatattttaatcagatttttttttttttgctgtggagttgtttgagctccttatatattctggttattaatcccttgtcaaatggatagtttgcaaatattttctttcactctgtgagttgtctcttggttgttttccttgctgtgtgtaagctttttagcttgataaaattctatttgtttatttttgctttggttgcctgtacttttgagatcttatgtaaaaattctttgcccagaccagtgttctagagcggtccctaaaggtttcttctagaactttcatagcttcaggtcttagacataagtctttaatccatttttatttgattgttgtatatggtaagagataggagtttagtttcattcttctgcatatagatatccagttgtctcagcaccacttattgaagagactgcgctctccccattgcatgctctggtacctttgtaaaaaattagttggctgtaaatgtgtggatttacagctgggttctccatgctgttccattggtctatgtgtcttttttttatgccaatatcatgctgattttgttactatggctttgtagtatattttgaagccagatagagtgatgcctctggcttcattctttttgctcaggactgctttggctattcagagtctttcgtgattccatataaattttaggattgtttttctatttttgtgaagaatgtcattagtcttttcatgaggattgcactgaatctataaattgctttggatagtactgtcattttaaaaatattaattctgtcaatccttgagcatgaaatatctttccattttttggtgtgtgttctcttcaacttctttttccagtgtgttataattttccttgtatggataaatgaaattgctttcttgatttctttttcagattgttcactgttagtgtatataaatgttactaatttttttttttttgatacagggcccggctctgttgcctagaatggagggcagtggtgcgatctcagctcactgcaacctccacatctggggcttgtgatcctctcacttcagcatcccaagtaggtgcaggtgcacgccaccatcgccaggtaatttttgtatttttttttggtatagacaggctgcccaggctggttttgaactcctgagctcaagccattttcctgcctctgcctcccaaagtgctgggattacaaagtcagctaccgcacccagcactactgattttttgattttgtatcctgcaattttactgaatttgttcattagttctaatagctttttttgtgtgtgtgaagtatttaggttttcctaaatataagatcatgtcatctgtgtacaagcctgatttgatttcttcctttccaacttgggtgcccttgatttctttctcttgtctaattgctctcaccagtacttccagtattatgttgaataaaagcagtcaaagtgggtatccatgtcttgttccaggtcttagagagaaactttccatttttccccattcagcatgatattggctgtggtttgccatatacagtgaggtatattccttctacacctagttcattgagggtttttatcatgaaatgatgttgaattttatcaaatgctttttcatcatctattaaaaagatcatatggtttttgttcttggttctgttaatgcaacgaatcacatatattgatttgcttatgttgaaccattcttgcatcccttggacaaatcccacttgatcatagtgaatgatctttttaatgtgctgttggattcagtttgctagtattttgttgaggatttttgtgtctatgttcatcagtgatattggcctgtagttttctttttgttgttgttgtgtccttatctggtttgggcctcaggacaatgctggttttgtagaatgagtttggaagaattccctccttgtcaattgttttcgaggagtttgactagaattggtatcagttatttaaatatttggtagaatttagcagtgaagccatcgggtcatggggttttctttgagagaaattttttattatgactttgatctcattacttgttattggtttattgaggtattctatgtatgcacagttcagtcttggtaggttgcatgtgtctaggaatttatccatttcttctaggtttttcaatttgttggtgtataattgttcatcctagtctttaatgattctttgtattctgtgatatcagttgtaatgccccccttttcatttctaattttatttatttcttctctcttttttcttagtctagctaaaggtttgttgattttatcttttcaaaaagccaactttttgttttgttggtcttctgtatggtttagtctcaatatcatttatttctgctatgatctttattatttctttcctcctattaatttttggttggtgtaggctgggcgcagtggctcacgcctgtaatcccagcactttgggaggccgaggcaggcggatcacaaggtcaggagatcgagaccatcctggctaacacgatgaaactctgtctctactaaaaatacaaaaaattagccgggcgtggtggcgggcacctgtagtcccagctactagggaggctgaggcaggagaatggcgtgaacctgggaggtggagcttgcagtgagccgagatcgtgccactgcacttcagcctgggtgacagagcgagactgtctcaaaaaaaagaaaaaaatttttggttggtgtgatggttaatactgagtgtcaacttgattggattgaaggatgcaaaatattgatcctgggtgtgtcatgagggtgttgtgaaaagagatgaacatttgagttagtggactgggaaaggcagacccatccttaatctgagtgggcacaatctaatcagctgccagtgggctagaatataagcaggcagaaaaatatgaaaaagagagactggcctagcctcccagcctacatctttctcctgtgctggatgtctcctgccctctaacactggactccaggttcttcagttttggaactcagactggctctccttgctcctcaccctgcagacagcctattgtgggaccttgtgatcatgtgagttaaaacttaataaacttccctttctttatatataaagggaatatatatatatggaatatatatatgtggaatgtatatatgtggaatgtatatatgtggaatgtatatatgtggaatgtatatatgtggaatgtatatatgtggaatgtatatatatgtggaatgtatatatgtggaatgtatatatgtggaatgtatatatgtggaatatatatatatgtggaatatatatatggaatacatatatataaaaaaggaatatatatatatatataaagggtatatatatatatatatatgtaaagggaagtttatatatatgttatatatatattccattacttctgtccctccagagaaccctaatacagttcttgcttttctagttccttgaagtgtatcattaggtaagtttatttgatgtatttttactttcttgatgtagacatttattgctataaacctccttcttagtattgcttttgctgtatcttatagatttgggtatgttatatttccatttctatttgtttcaagaaattttaattttttcttcttaatttcttcattgacccattggtcattcaggagcatgttgtttcatttttatgtgtatgtgtagtttccaagattcctcttgttattgacttctagctttattccattgtggtcaaaaacaatatttgatatgatttctcctttttgagtttgttgagacttgttttgtgggctaaaatatggcagactctggagaatgttccatgtgctgattcaaaagaatgtgtattctgcagcagttgggtgaaatgctctgcaaatgtcagttaggtctatttggtctagtgtgtagtttaattctgatgtttccttgttgatttgctgtctgcatgacttgtccattgaagtcccttactattactgtactgcagtctacgtctcccttgagctccattatgtttgccttatatacttcggtgctctgctgttgggtgcatagatatttataattgttatagcctcttgcaaatcgacccctttattctcatatagtgaccttctttggctctttttatagttttttactttattttatctgacataagtatagctactcctgtttttttgtttgtttttacttgcatggaatatcatttttcatcacttcactttcaatttatgtgggtttttatagatgaggtgggtttcttatagctggatcttgtttcattatccattcagccattttatgtcttttaattgaagaattaaatccatttacatttagtgttattattgataagggcttactactgctattttgttgcttgtgttctcctttttaaactcctttcttactgtcttcctttgtggttaagtgattgttttggtagtatgttttaatttattgctttttatttttagtgtatctattataggtttttgcattgtggtcaccatgaagcttacaaaaaatgtcttatagatataacaagttgttttaaagagatgataatttatcttagatcagaaaaaagaatagaaacaaagaacaaacttaaaaaacaaaaaaccctctatacattgactccaataccccccacattttgacttttcttttctcagtttacatacttttatattgtctgtctgttaataagttgctatagctattattgttttgcatatacttgccttataggtttcctactagagttttgagtggattgcataccataattacagcactggagtattcttgggttgtcttcatactagtgggttttataccttcaaatgttttctttttgcatgttagtgttttttttttctttcaaattgaagaactccctttagcatttcttgtaagacaggtctggtggttgtgacttctcttagcttttgtttgtctgggaagagttaatttctctttcatatatgaagaatagcctttccaaatatagtattcttgggtggcagggttttttcagaacattgaaaatgttgttgcgtaccctcctggcctgtatggttttcgttgataagtctgttgccagatgaattggagtttctttgtatgttacttgcttcttttctcttgctgcttttaggatcctctctttatccttgacatttgggagtttgattattttatgccttgatgtagtcttatttgggatgaatctgtttggtattctctgaccttcctctacatggacatttatatctttttcaatttttggaaagctttctgttactatttatttgaataagctttccatcccttgctcttgctcaactacctcttgaacaacaataaattttagacttggtcatttccatgtattttaggtaaactttcttcctgttcaatcttttttctcttttgactgtgtgatattgaataggctatcttcaagccaactgattccttcctttgcttgatctattctgctgttgagaccctctaataaatttttcatttcagcaaatgttttttcagttccaagatttgtttgatttttaaaattattatttcaatctctttgttaaatttctctgataaatttctgaattgcttttctgtgttatcctgaaggccactgagtttccttaaaattgctattttgaattatttgtcagagagctcatgtatcgccatcttcttagggcctgtcatgggtatcttgctttgtccagttagggaggttttggttccctatttgctgttgtttcttgtggatatacctctatgtctttgcattgaaggatttgttatttattccagtcttttctggcttgttttggtttttatttggtatatttgcctagagattctttgtaatttacttgttaatttcttatttcccccaccactaagttgccacctcctttttggtgctagatgatgccttaagcacaggtttgcctcagctctagcaaagaatcagagtgctgcaagtcccaaatggaagaagtcccagtggggatatcttgccaatttgggaaggctggctagaggttcatgcccaagggacctgtggaaggtaattcctaaagctagtgctgctaaacagtcactctgatttggcatctcctttggcttaattacagagcagagtttccagggctgggcaaggtagtcccacctctcaccttgacttttgctgtttgcagggatatttctttcttcaggcacttgtgatgctttctgtgggttgaggcaggtacagttcccctgccagggagccgaaggtgatggggaagctgcttgtcgacctctatctcactttttccagggtagaaactatgagtggggaggaattttccccatgcttcatgacaggcagattgtggggaggggcatcgtggatgtggaaatctgattctcttagtctattccaggctttttcacttgtctgtggccccaggaactgactcatcctcatctttgagttctgggatattgctggtgataatatctgcactgtctatttgttttgagttttctgtggacagggaaatgaagccagtatgccaccattttggaactgaaattctccaaagtatacactttaagtcgctatgataagcgactctcataggccaaattcttttaaacatgacaagtcttaaaaaatcaagtatccaccaattctttaacacaaaatattaatataaatactaattatacatcttccagaggttgcacctagaaactttttggagtaagtaagactgtccatctaagtgcccaataggacaaaaaccttgcaggctttgaaagattcttacacacccataggaaacgattacatcattgtatgtaatttggggaattccttcttagatacttggccagcaatattggctgagaagctgacagtagtcttgtctgtgaccctgaccagtacacactgagctctagttatacttaataatagaaactgaatgaaaagaaaacagtggttacacagcttatattcctgactttgaatcatatcatgactcattgtttttccaactacatggaagttggcaacccctacacagactggcataccacaaagttggactcagcagttatttggctaagatatatatatagatatatagatatatatctatattatatatatagagagagagagattgagagagatggagtctcaactctgtcttgcccaggctggagtgcagtggcatgatctcagctcactgcagcctccgcctcttaggttcaagtgattatcctgtatcagcctcccaagtagctgggaatacaggcgggtactgccacacccagctaattttgtattttcagtagagatggggtttcaccatgttggccaggctggtttcaaactcctgacctcaggtggtccacctgccttggcttcccaaagtgttgggattacaggcgtgaaccaggctaagatattttagtacatttttcaaggtgctccaaataagttagaacttgataaaattctaccttcttttcatattcttctctgaagtggtctgaaaggccatataacccttatatatattaaaatgatatcagtcactcatggttttgcttgactatgtgggtgaaaatagtgcactatatttcttcattcccatctttaaatgaagtcagctcttgtgtggtggaggcaagatgtcagtcaagacaaggggcctggtctaggcttctttcccctgaagtcttgtctctgcaatggccacttcagatgtttatactccattcctccaggtctagcccatattctgaaaaggcaaggcaatccaccactcaacaagtattcattgagtgccagccatgctattggggatgagaatagttcagtgcataaaagaaaacaaaatccctgccccatgggatttacatccagtcatacttagcagatgtgtgtgaatctggaagcaccttttctatagcctgacagaattcttacaacaggtgaaaactacttgccttgtcttcgggagccttgtgcatttggatctatcctttaacaactaaccttgtctatcatcctcacagtctgactctttacttctgggatagtccaacagagacttgaggaaatgtttccttctctctttttccattttcccaaatttaaattcatgaaatatatataagttctctaaattaaaaacaacaggatattttaccaactttctgttctgaactaatttaaaatttatgtttccaatccccagagatatgaactaaaaagcctgaaataaatgtagatcagtcacttgagctgacatatgaagcagtcaactttactctgagacgttttgtttgatctttcaagtttctaaaagtatttggaagcgggaaacactgttcttcatatgagataaaaggaagaaaaaaggaccttatagtcaggctcattgtgaaaaaactaatattaagataagctgaagcaatcaaatgagagcatttgcaaatcacttgttggaggtaaagctggaagcctatgtagttcaggaaaatggaagatgagatggctgagatcccacgaaaagaccacgtccaatagaaactgtaataaaacagagctcagctacaggaattttcaatgatgacaaaattttaaagacatgcttctacttttgtattgactaaagatcttcaggttgaaagtgtcaagatctgcttaatagcatatcctctgttgcaacattcaaaatcatcaggattcttagatctcagtgaaaaattgatgtttgaagaataattgaagtattcagtccataaggaagcctgaagctccctatacaccttgaatttcatgctaaataatctgcaagttctggaaaatgctgcttaactctagaaaaactgactaaccttgatcttggtcagcatatacttggttctttacatatcacttatcaatggtcagaaagggaagaatacttgaacttatctaacacaaaaattcacaatttaaccaattgtttcccagacacgaggcttactagaagtgagccttgtaaacttttatttagctgcaatttaaataactttacattttcagatatgtgttgaagaccctaccagatgctttcttcccctttgagaagaagcaggaaaagaaaactttctctaaagggcaacttgactcttttcacacactgaagactttggaagctggtggcaacaacttcatttgctcctgtgaattcctctccttcactcaggagcagcaagcactggccaaagttcttatcggttggccagcaaactacctgtgtgactctccatcccacgtgtgtggccaacaggttcaggacgtctgccttttggtgtcggagtgccacagggtggcactggtgtctggcatgtgctgtgccctgttcctgctgatcctgcccatgggggttctgtgccactgtttccacagcccgtggtacatgaaaatgatgtgggcctggctctaggccaaaaggaagcacaggaaagcttgcagcagggacatctgctatgacgcatttgtttcttatagtgagcaggatgcctactgggtggagaaccttatggtccaggagctggagaacttcaatcccctcttcaagttgtgtcttcataagtgggacttcattcctggcaagtggatcattgacaatatcattgactccattgaaaagagacacaaaactgtctttgtgctttctgaaaactttgtgaagagtgagtggtgcaagaaggaactggacttctcccatttccgtctttttgatgagaacagtgatgctgccattctcattcttctggagcccattaagaagccatttgccttagtcaatctgggctgctatagcaaaaatgccaatagactgggtagtttatagataagagaaattcatttctcacagatctagaggctgggaagtccaagatcaaggtgttggcagatttggtatctggtgaggaactcttccaggctcaaagatagctgtcttctcactgtgttcttggtggtggaaggggtgagggaactctctgaagtttcttttggaagggaactaatcccattcatgaagcttctgcccccatgacctaatcactcatcaaagggcccacctccagtacctcacattgggggttaggatttcaacagatgaatttcaggaggacacaggccttcagtctatggctaggatcattccccagcatttctgttaagctgcagaagataattaacacctagacctgcctggagtggccactaatgaagctcagcgggaagggttttagttaaagaaaactcctagtttttagttcgaccattgtggaagacagtggtgattcctcaaggatctagaactagaaataccatttgacccagccatcccattactgggtatatacccaaaggattataaatcatgctactataaagacacatgcacacgtatgtttattgcggtactattcacaataacaaagacttggaaccaacccaaacgtccatcaatgatagactggattaagaaaatgtggcacatatacaccatggaatactatgcagccataaaaaaggatgagttcatgtcctttgtagggacatggatgaagctggaaaccatcattatgagcaaactatcacaaggacaaaaaaccaaacactgcatgttctcactcataggtgggaattgaacaattcccacctggacacagggtggggaacatcacacaccagggcctaacgtggggtggggggctgggggaggggtagcattaggagaaatacctaatgtgaatgacgagttaatgggtgcagcacaccaacatggcacatgtatacatatgtaactaacctgcacgttgtgcacatgtaccctagaacttaaagtataataataataaataaaacatatcaa

SEQ ID NO: 73 - DNA, 2215 bp, Homo sapiens
tggcttgaattaagatgacaaaggtagagatggggagaggtggatgaacttgagagctatttcaaggataaaatctaaacgcataccctggagttcagggacgtggattaggacaccctactggatcccatggagaaggatgattcaagggatatctccctgggggggtgtggttcttgtttgtggacccactggtttatttaccagaacatggctcttctatgctatcgtttttgcatcttgggtcaaaagacaacaaggttgctgaccaggtggcctctggtctggcatcctctggccaggcgggtcctgctgcacttgactgagaaagctggccgctcggactactgctacatttggttgaaatttctttttctttgtaacctagtaatgcaatatacctggaggtccatttatattattaagcttttaatacatttcataagtaatatcctacttactgaaaacatttactgtttaggattttcattagatcacttggataaatgcagaattcccttaaagttgacaacaatgaggaaacttacaaaacaagtgatttgtcaaaagctgaaatctgaaaaattatgttagttttggaggtctaggtaattaatacggtttggaaatagaggatcttagtgggttataagcacagtatatattcatgaatcgggctttctgggaagatgtgccacacactcaacagacctgatttcctttcttcctgcgactgcatttcccagcctcccctgcagctaggtaagatcatgtaatggaattctggccaatggaatatgagtggagttaatgtgggtaacctccatgatgggcaaagaaacacctcccaggaaaaagtcttgatttttcctcatgtctgctgactacatatcgactcttgaatagacttgagtatctgctgttgaaggatgcagaggctctgtcagcctgggcccctgagtgacttcatggagtataccatctctccaactggattttatgtaagtggaaataacgttctacaaggttaagccactgagatttgggggtttgcctgctacagacatttagctgtaacacatattaatctgtatgactggctaagtgcagttgaaccaggtagtcctggtctaagaactccttttaaagatcgtcatgtttctaagcatctgttttcagtgtacctggtcattctcacttacctgttctttcagctttcagtggttcagtttttctccactgtttccaccaaaataccatcaacagtaaggaagaacaatgtggaccaccagaaggctggagtgttttctgaagctgctcctgcttggactttggttggaagtcgtgattgtctgagggttcatgctggcgctcccccagtgaacctagctcacctaccctctgctctggctctagtctctcttcccttcttctaagggaggctactgctgtgctcagtgcggagctgggttcaaggagagctggggctctgaaggagtcgtggggagaaggctgacatgagtcctgagtgagtggacctgctctctctggccctgaaggggtcaagaggcaactgggtgtgtgggctgagtctttcctggccctgaagctggaagtagaggctttgtgcaggatcctcagcaggggactaaaagcctgtgctttcataacccgagccacactggcaagtgcgctgcctcctcccacctttgagacagttgccttcaggagcacatctaccagaagccaacaaagaaaagcaacagcctcttggaggggcctttctccagggagagaagggtgaggcagcacaggcagagctggtgtaggagacacaagacagtatgaatttcaaaatcagagcattgaaggagattcaaatatggcacaaaaagagtttctggagctaaaaatcataatttcctaactaaataccattcagtagattaactgaaaaagtggaagatcaccgtgaagatatggtcagctctcctggagggtcaaagggcagacagaccccttgatgaaaagggtggtatagagcaaatgtagaaagagatgggaagcaagtagaaatgggtaaggaacatgggatggatcctaaaaccttgacttgtgaatagagaaaccttgacttgcagaaagaggaaaaaatagaaccaacggaggagaggtgaccatgatactaacaataaaagaaaacttccctgaactg

SEQ ID NO: 74 - DNA, 38667 bp, Homo sapiens
gggttcgctagtggctgctcctcgaggcgagaacagagccatgcaaatgctccagcgtggagttgggtttgtgaagtcgccagtaaatcaggccgcctccactaggtgaataacgcggtggcagcgggccactttgctagtgcagtcgctggaggaccgcgctccgcactcagaagggggcagttggctggtgcgcgagcgctcccggctcgcctctgtccgcggggagccagccggcccctccgcaggtcccgctccctgacatttgctgtggtttcactccctggcactgagggctgggttcagagattcccagctgcactcactgaacagtgatttttttcccctccctgaattctttagctgccaaaaggggggaaaaaatcaagagctgctcttaaaagaagttgcccttgctggtgctcagggtaaaaatagaggctgccgcttagaccggcttggccctggctccaggcatcctgcgagctgggctcgagcagcggccgcgttccggcgtgatccctggaagctgccagcaggtgctgctcaaggtacagtagcagggccgagaagccgggacccgaagggcctggggtgcggggaagctccgggggagggggaagtgaaagagaaaccaaaccaaggaaggagaaggagattctggtcaggactgggctgaccagcttgtgccccgggcccttgagttccgcagggaaaagctgattcccagtctagaatattccacagaagctattttaacctgcctgcttcctccaccacccccaccttgatttgcaccgagggaggaggcattgccactgtggtgcaggtggttgcagaggggttgcagcacggctggtaggctggcctggcaggtgggcactcggtggcatcagatggccagcggagtttcagagtcacacttgtgttgtggctcctctggtcagagagctgcagattcctgtgacacccatgtttaagaacagccaccaggcttctcagaaatagtatcacttattattatctgacagctgcacttgacccccacaggttcatatcatggatcccattttatagatgggaacactgaggcctgagtttacacggtgagtgagcagaggaactgggatctgatctgggtttgttttgtgccccccacccccaccccacgtcacctacacacacacacacacacacacacacacacacacacacacacacactactttgtgtggaggcggaggggatgttttcaggacactagggttcatgtgtgggtcaggggtgagtttagatgccctgaaggtcattgactccactaattctcagcaaaaagggtggagaagtttctttcttataaagggtttgagttcacccagtgctaagctgaggggcaggtttggagttcaccatcattaatcctatttctgtcttcgccactcagattcactctcttcctctacaacctaatgatttttttcctacttcatttctgcatatgcagttcttagaatactccttccccccacccccatgcagctcagcacccacactttctctgtatctagccaagagagacccttttacacagaaaacttctggtgtcctaatggaacctgcttaagccacacatcaggaggccagagcctctatattttgcttgtgggcacagtgaaaagtttattttatgcatgttaaatcctgcatacaaaacaacatatctggtcatatggctctcattagctcccaattttgcacattttatccaacttgtcatgagaactgggcttatgcttcaactgtagtccttcaaacaacccttcaccgttcttgtcagaggaccccttcctcctgtgttatttaccagacttgccaacacccctcccccacaaaaaaagcctgaccagctttacccctatttcaaggagtgttcacttcttttcattaatctgctgttatatttgtaacaatttagaaattataggagttgaagttctggtaaaaaagaatgatgcatgagggtttttgttgttgttgttgttgtgtgtgtgtgtgtgtgtgtgtgtgtttggttagttagaatgagattctaaagacctgggaaggatacttatgaagttcatttaaagagaattactatttccaaagttcttgatttatgaagcaggcattcaatttcaagatgtaaaataatagtgtaagttggttggggtcgggggagaccatcatcatatgattatacagattttcccaatttttttcctcaatgaaatagcttattttaaaaatataaaattagaatccctataaagaacactaccaattttctttcctgaaagaaacaataaaatactttgtaaatagaagcaacttcatgaagtaacagatgttttatgtaaagacataaaactgaacctgaatataacgagacgtgtgtgcgagtagtaaaagttgaaagttggacacactcattgagacatatctatttgattccaatgtttttctaaaaggtagagtaatcctagccagaggtttcactggctcagtgcatcacccagtagtgtctcagaagccaggaagggctttccattagataatgaattatgaaatgtctcacactggaaaaaccagtcatccgctgatgtcatgctgattccaaccaatcccaaacaaagccccagccctcctctgtttcagtggtaccaatgtgtggtgtacaaataagtagtacagtataaaacttcacagtgccaataccatgaagaggagctcagacagctcttaccacatgatacaagagccggctggtggaagagtggggaccagaaaggtaatgctttttaactcttacttctgagctctttacacattcaaagataggaaagctaggaggaattttacaactaattggcatttccaatgtgcattgtgatgtgtacctttttatattattcaggcaggttaatacagcttttaatagtcctagagcatgcaaatagattatatgtttatacaagccactcagcacatatatacaagtacatatgccaaagagaaagctatttttaagagttacattcgcaaacagtaaattcagggaacacacacatactcagatgcagagagaatccaaatattgataagttgcacttatctaaatgctgctattaggactcctgagttgtttagagccattaaacttttggttgtatttcagactttcttgtaaaacttaattgaactgcaaaacattttgggtactgtatatgtgactccaaataggtggatgatgttaagtattatagcacaaagattttttataaaaccattgtaacacaaatgtcccctgcctcccccattctctttcaccatccccgtaaaaaatatgaggctttttaggcaatgttgacaaagttttaacaataatggtggagtaattgatgtttctggagctgaaaccccaaaggtgttaggttacttgtaacagaaaaagtcttacaaatagttgttttggaaaaggggacagtatatataattcagaaagcattgttaacctgtgcaaactgtaattataacttagtgtcacaattttcttgccctcttccccttgcactcagatcttatcttgtagtaatgatatttattaactctttccacctaaactgcattgcttgactgtaatgctatgaacacactaggtgtcagatataagctgagtgtatcttcagaaaccaagagggcttatgtgtgggaaagaaaccgagagggaaggaacgctttaacagatggaccccttaaagattcttctgcaagataaaagcaataagacagaaaatgaaaaagaggggagggggaagaattttttttaagccttagaaaggcattgttaaaaaattcacatttttctttttctgtgcacactaaaatccatgatgatttcatctgcactgttcctttgagggaaaaagaagcagtcaaggaggctgtctatgaatgcactggtcgggacaggcttggggcaagctgaaaaaactaccacatgacagagaaaaataatttgccaatatattttagagagtcttttcccataggaccagttattcaagtcatacgagtgcactctttttataaaaggatgtgggaaaggccaagagaattttgcattttatctgtgaagtccggcgagtggtggtaggctgtaatgtgtgagagtgagtgggtccccggcagaagggggcagctgaacgcgacggggagaaagcgcttctggaacttgggcttgtgacaggctgcctgccctctggtccttcagtgccctgctgcatttcacagttgggaagagtggagtgtattatatgaccccaaacaaaagttccattgcgctctcctcagattgcctgccagtgttgatgacctgaacatttaaatatgaatgaattgggggaaaggaccatctcccctggatcccatcaggccagaacaatcctctgttacccctgagtccctcttccctgacctccactacctgtccactggacctccctgcaccctctgccccaccacgtggccaggtgggcgttctaccacctagggctgtggcttggctgggtggaggggcggtgggaacactttttcaatcaattcatccctattgattgagacactgtgtttgtttggggtttcttttctcccctccaaaaaaggaagaaggtgaaaccaggagactgggcagagaaagaaaaaaaaatagtgaacaaaattaggataatttattttagaagagaaagtagaacccccgaaaatggtgatatttgaagagaggtgtctgtgaggaagctaagagcagaaggagagcagcctgtcagaaaacgggctgtccctccctccctaatcacagccctactcacagcaaactccctccctctccattcactcacttacttagggccaatcctttctctctctctctctctctctctctctctctctctcttcctttccctctctccctctccccctcccttccctccctctctccctctctctcccccttctttccctctctcttctctccccctctctcctctctctctgtctctgtctccctcccatcctctctctctgtctctgtctgtctccccgccaccctgtctctccctccctccctgtctccctccctccctccctccttccttctctcttactcggagacagtcagaactctcctccctgacagccacaaacctacagcactgactgcattcagagaggaacctgcaaacaaaacttcacagaaaactttttgttcttgttccagagaatttgctgaagaggagaaggaaaaaaaaaacaccaaaaaaaaaaataaaaaaatccacacacacaaaaaaacctgcgcgtgaggggggaggaaaagcagggccttttaaaaaggcaatcacaacaacttttgctgccaggatgcccttgctttggctgagaggatttctgttggcaagttgctggattatagtgaggagttcccccaccccaggatccgaggggcacagcgcggcccccgactgtccgtcctgtgcgctggccgccctcccaaaggatgtacccaactctcagccagagatggtggaggccgtcaagaagcacattttaaacatgctgcacttgaagaagagacccgatgtcacccagccggtacccaaggcggcgcttctgaacgcgatcagaaagcttcatgtgggcaaagtcggggagaacgggtatgtggagatagaggatgacattggaaggagggcagaaatgaatgaacttatggagcagacctcggagatcatcacgtttgccgagtcaggttggtgctggcattggcagggggtggggaggggtggggggtgggagggtaaaatatatttctttgacagtcccaggaggaacttcttttcccttcagctggaaactgcctgggaaggttattagttattaggtgatggtagcggactagccgacggagggcaggcaggggagggggagaggactttacagaaaaggaattctcggtcgagctctgcctggagatgactggcttacacttactaaacccagcgggtcacacagagaggaagctcggggccaatgttgagctggaaggcagactgtgaggggctgccttgccctgcctgtgaaaccagatctgagcagccggaggaaagccgcggcattttcgggtgctaggggagcagaggaggcttccggaccccatccaagtttttattgagggtagaggggtgaatgtaccaggattggagtggaatggcacagatgaagtcactctcttaaaacaaaccttcccctttaaaagtccaatctggggccacattggagaagcagggcatatttatgagtgacagtcatttttacctttagaaaatgtctataagtgcacaggcaccacattcaagacagggaagagctactttgggggacagttgtcattgaaccagcagttacttttgggacactgacttttgctctctgaaagaaaaaaaaataaataaaacaaccagttttgttctttctaaagttactaagagctctctgccaaggaacgcaaccttgacaaagtactctcagatactacgctgaactcactcaatccttaagaggaagaactttaataaatagattctaatcgttggcccaggaccacactaacctgttgctgaatagcaatacctgtcaaaagtatgggcccatggacttggagccaggctatttttatagttaagtgacacagatcctttgcatgcctgcaagcccatgcacgtcaggcacacagatgtgttaataccgtgttactttcatggtaatgccaggctaaagaattgcatcctttgccaactccatttgaaaggaatgccattgttttgtttggtagagcatatggccagtaaagtatgtgcagggactcccagcatttttgtttaaaagtttgccgcagcagtataaacaattaaggcaacactcagaatttccaatctgaaaacctgttgactcagatgttctgttttcaagaaaaccatgaaagaccagggcatctttccgggggtgcagatagcctgctggctgtgtggcttccccttgcaggagaagccctggtgtcctacaagcttcccagtttggctctctcaccagaagcctctctcacttagggaagatcctactttctttccctaaagctctttcttaacccagccccaaaaggcatgatcattaggactttatcttctggagctttttgaggaagaaagctaggttggaacttttcaagttgacacccatttttttttctcaacttttcatggtgggaaaaggtaaaaaagaaaatatttacaatatttggctgtgcatgtgaaacagatttcagtggtctagagggttgcttcctgtctttgtataccaacctccacacatgatggattcaatgacagctcgtatccagttgcctttaaccatgtcatatgactaagtatacctatgcctttgaccacttttaaccgcactaccgttactagcaatatgcccctctttctgacttactggacttgtatagcaaatcactctcttagcatttagagatttggcagtgaaaaaatttgaccatttacattctttcttatgtgtggtcttcctttctgtgacagtcttctctcagttgtatgagatcttgtcatttttttacttctcagttaggtgtttagtttgaaaaaaaatgagcgacttttgaaaaagcgattcgttggacgttcacattgagtcaagtttaagatttgtaatgggaaactcctggttgactttacaacttgactttggattcttagaaaacacttattacaattgcttatttttctctgagggatttcacacatcaacttcaagttgatttaatgtaatttcatgtatttaatgattgctgtatggactgtctactcttcaagcagaaaaccacgtgagcattttgctgctgattttgctagtccagaaaagacatttatcatccaaatgattgtagcaaatatatgaacatgaatagaaaagacctatgtcttgttgcttttggaataattcaactttaataacattccaactatgtggaatgtcaagagtttttggagaatagaaaaaggaatgcatttttctttcccttataaccattttgtgcagcatagaatccagacattgtcacccatgagcatgccacagatgcagacccatagcagcccctttcaacctcaagattcttcaatttgaggctacgtttaatttttgccttttctctccttgattgttggataaagccaaggcctggctacagaagtagagagcctccaaaagctgaagtgctgaggactcttttaactgagtttgtcccatcctgtttaggtagaaagtgctcaatttttgtaaagttgatgcgagttgttattgactaaacagcagggaatcactctaaggctctctgaaatgtatcccaacaaacaaaaattattttatttttatatatgtcacatcacccaagatttctcaccaaggttagtgtgttctttgcatggctggcacaaaaccctcaatgttttaccttaaggcctacagagttcttcacaaggaaagatagaagggatgggtaaagccaagctatcactataaatgtcatgaagctaaattcagtggccttttcagctgatgcagcttatttttattttattttgactcatgacagtaggtggtcaatcaatgcataataataatgtacctctaagtctccatatgctgtcaaacctggatgtgggttctggtaattagcttagcaattgatagcacttgttgtagaaagaatagggaaagaaagacaaatgacacaccaagaaatggatgtgctcacgtagcctaggtgttgttaagcgcaacacataagtctaccccttggaggatactatgtatggaagatttgagttagaagtttgcactgcccagacagggatccaagaagctttgcttggatgaccattttccccaccccaagaaagccatctcaaaatgaagctgactcccaccattccaatcccaccttccgaacttttctgtgaatcacccctcctttagggatgcctttaggggttacacgctctcttccgtgaataatggggaagagcggccacaagagggcgcgttccaaagacttttgctccttgtcagtgtatccagggaaaggcagttgcgcgtactggaagcccctgtctgtagcgccctaatcttggtgattatcagttaccgcctgctccctctcatcctgcagaaaaagttaggaatttatgagatgggagaagcatgactacctgtaatacattaaatgagacagaaggaaaggaaatggaaattctagtgatacatgtgaacattccggagctctatggaaggcagacgagtgataaatttcaaaagcaaacaaagcggagcagggagaaatgtgactatgaatcatcagcgatactgatttgctcacaagtctctccctaatacggtctcccgggtcgtaacaaaaacatcttccatctcccctgattttgttgcctagttttcctgccttatcaacagtttccaccagcgacaaatgacaagtgacttcaaacagggaggaaaaaggttctttctgtaatgccttgtgggaacatggtgttcggcttctgaggatgcgtttgtttccgaactgagggtgtggagagaaatggtgggaaagatgggaaaagagattaatagtggtctgcggcctgtgcagtggatggactgggctgggggtggtggagatgccagggtggaaagtccgttgtaatatttaaagaactgcagtaataccttcccaggcacttttcttgaaaacacatatttgtcttggcccctcttctgctaaaaaatacttgcacgtgatctcctagctgtagttctgaattcttcgtactcgactggttcctaagtccaaaatgagaagtgccaaagttctcaggaactttggaagaagtctctgaaattttgtgggttaaaccttaagaatttttgctacttgtaggaacctaaaacccctttctcccaaaatatttaacctttttcatcaccactttaatggaagaggcatggatgatggacgtttgtgccagggcatttataaatcaataatggaccctaaggagggaaattaaagctaaaaaattaatcaagataatttatggccaaacctatagttctactgcaggaaagatcctctactgtaggtcaaaggaggaataaccttaagacctcacttgctgctttctgcagaaacccctggaagcagtccaaatgcaaagttagggcttcagagaatgcaccctgtaaatggtagttgtgtatacccttaccattgactataccatatctaggcacagtgaaatcttgatgaagaatggaaaattaaaggaacagacgctttttacagggaggcttcccccagcccccatcccatggtaagtttaaatgtgttctataaacaacgaggctttccacattcacattagagacataactattgcccatatgtaaaagagcaacatattttaagcaggaccctggtgaggaaaacaaaaccaaatcgaaacactgcatgtgtgtgttgcttatttaactgaaaatgttcatagacccacaaatctgagatgctggacttttggatgagtccagcattttgcatcttagtgtagggggagggaacaacaaggggcttagttgcttaacccttgccatgccttcatgattgacttattcaaaacatttttaaaattctgaaagcaaaggaaaatgtgctgcaaacacccttccagctatctttccttccagcttacacagtctctcctctgtccaatccttcccacccagcagcatttcagaggtattccctgtgaggtacaaaatttctctttgcccatttttctgcacctctttttctctctctttggtatgtgtccaccaagctcatagaggtttaagtgatgaaatattatcacccacatgggtttgcgtgggactttcttagtgaattactcaggcagagcaggctgtgatacagccttgctcacaagcctcgggagggaaaaaatagcacagaggatgaaaagaatattattagagagcaggtaatgaaaggttcgcaaagcaaccagctatatctggttagctaggtaatagtgcaggaacctaggtcgcacctgtacaaactaatgcagaacctgctcacggcgcactatgggaagacattcatttcaagagtttacagcatgagatatttgagtaaaacctgaaactgattagaaattgatcctgaacatcccagccttagtcaaccttccctttttcaaattgttatgcatggagattggaggattggggcatcttgaaagtgtcactgcagtatagcaatctctctcaggtaatatagagataaagggaatataataaattgacctgttatttattatctttttcatacctaggacattccgaggcttaatatatttctgaagcctacagccctgataaacatcaatcccacgtcagtttccagcagtctcatctccccacacccttctgcaatgaaagctaatgtaaaagaaagaaatatgcactgcttaataagtcagaatacaatagaacttgtaaaatgtacctgcatataaggtagacattaggaagacttgaatctctctcttccccctgttctcctgagcattatggcaacagcattttcatgaaattagatctgttttatattttttcctgataaaatatcatgcaatatacaaatagcagttccagaaatggacaccaggagaaggaggcgacaggcatgtcaattagtagggggaaaatccaaatgtcagaaatatgggggagagagaaagcacgcaggcagtggatgcaaatacagggaacagagtctttcaattcagataattaaacggatgcataaatcagcacccttgcctctctacaatacgcaggcgatgccatgcagttaattatcagccaagaccagcatgaaagtcattttatgatgactctctgatcctaatataacagcacctgacagattgagccccctctaatgagtactctctttgtacaatcctctctcaggaacactaaatcatttgcttccaagtacagctgcctgtgaagaaggggtggggctagatcatgcatcagaaacctgctcttgtgaaatcaggggctgtcctgtaggctgtgtgactggaagccagcagcctcagcctctctggccctaaaaaagcaatttgcacacggctgtccctaattctagtcagccaagtaaccctccctcggcacccccacctaaacatctgtagtcagccttgggtgttattcatggaaagtccactgcatgcgggtcagcactgctgtccatcggcttcaccctgaccccttctggcaggtgtggatgagagtagagcagagctcatggggatgagttaccccaaacctattaagcctccctatccggggcactagtcagacactccagttttacactctttcctagaaaaacaaaacccaaccttgtgccctctgggttctctaatttagcagctactatctgtctgtttttggagtgacaccctgtgcagtttaggatttcagaagctgtcctgcatagaggcagaagggaaaacagcaggtatcttgttaacattctctatggggcaaggcagatgtgcccaagctggaggaaacctgcacaccctccaggctagttatccaaggcttgggaggtttccctcggccttctcctaaggccttggcaggaccctgccaccctaaaatcaactgctgattgcctttttagatttaaatgattaagctctgcttatgggaatcttcttctcttttattttgttaagaaacaaacaacaacaacaaaacccacaccaattcttagcaaaggggaatatcgaattcagattttgaaaaaataagtcatcatgcttcctaaaataagacagcttctccctctaactgctctctctgctctggtattctatctaatcataaacccagctttattattcatttcaactcctgccaaagacatgaggtcggagtcagaggaactccccttaccaccgccaccatcatcatggccagcatcctcgtaagtttatagaaagatgccagagaacctttcctatccatctgcagccctgcttggcccttgcctcagtgaatttaccactatcataatcacagtgtgcagagtgtgttaaattaagaacagaatccacagtacgcaatgcacagaaaagcctgccttctgctgcagagaacttgaaactgtgcctaaaatttatagtaccgtaaacatctcagggcctcgagtgataagtatggctggatttccgttaactatagaaatccaggcagggagatcctcccagggagttgcaagttctaagatgaacttcttgaagattgttcccagatttgtgcatgggatacatgtacagcagacagttgtaaggaggtccacggtcatggaaaagaggatatgtttctatatgccaccaagtgggaaaaatggaagtgagggaaaatatttgattaatcaaaaaattttagtttggatacctgctttcatagtaattgttgctgtgtcattaaacatacagttgcttaggaaaagagaaggaaataggtgactttctaattttagagttaggctggaactgagtggttgctaaattcaactgccctgacaatgtggggatttcctgtccattagcagcgattgctatttgacatatgtttctggtgcccattaatctgccctgtaatgggtcagaggcaaaaatgggggattcagaggtactaggtggctctcttaatttaatagaactcaatgctaaggacgcctctatttgttaataagtaatcaagtcattggctactttctgctaaacactagactatgatagtgaccttagaccccgggcattctaaaccaggctggcaggagggtggtggtggaggtgatgtgaggtaagcctcctagaggaactgtcatccaaacaatctgaaaattgaaacattattaaaggcagcactaagggtggtatgttggagttggggcaggagcacttaaggcagaaggaacagcaggtgtcactgcctgcagttgagaaagggggtggaattctcaaggccttagaccccagagaacaggactgggcaagagctgacattcaagggaggaacagcatgtacagagcccaaagtcccagccactttctgttggatactgagcaataggaattcagtaaaggactttcaagaagaagtgatgtgatcagatccacctgtgggaaagatgcctttagctgcttcatggagaaatgactggagaggaggccttccttagtgttgcagaggcaaagtaaagaaaatgctgctgcagtgacccagcaaagaggtgatggcggaggaatcaggctgtgacaagggaagaagaggctggctcaagtgtgtctcgactgcacagacttacacagcgaggtggggccaggggctgcatttttgtctgagaatagtatttccttagctttctagagcttacagtgtctttttgtttatgttatctcatttgaccttcctaaacctgtgagataacaggtcaaatgtccttatgtcattcccatttttatagaagatgaaactgaggttgagcaattagtcaacagacacagactcgcaggccctcttcattctaaagcaagggtccaaaaccttttttctataaagggccagagagtaaataatttaggctttgtgagccaggcagtctgttgcagctacgcagtccttggttattatagtgcaaaaacagccataggcagcatgtacagaaatgagcataaccatgctccaacaaaactttatttacaggcactaatgtttaaatttcaggtaattttcacatgtcacaaaatatcacttttctttaaccacttaaaagtataaaagccattcttagtttgcaggcagtacagaaacagtttcagcccatgggctgtcatttgttgacccctattcaagagggtctgtcacagaagactcctgcttgcctgaaatttacgagtgcatgtaaatgttggaattaacaggtgtgcctgttttctcttatgctgtctttcatcttcaggaacagccaggaagacgctgcacttcgagatttccaaggaaggcagtgacctgtcagtggtggagcgtgcagaagtctggctcttcctaaaagtccccaaggccaacaggaccaggaccaaagtcaccatccgcctcttccagcagcagaagcacccgcagggcagcttggacacaggggaagaggccgaggaagtgggcttaaagggggagaggagtgaactgttgctctctgaaaaagtagtagacgctcggaagagcacctggcatgtcttccctgtctccagcagcatccagcggttgctggaccagggcaagagctccctggacgttcggattgcctgtgagcagtgccaggagagtggcgccagcttggttctcctgggcaagaagaagaagaaagaagaggagggggaagggaaaaagaagggcggaggtgaaggtggggcaggagcagatgaggaaaaggagcagtcgcacagacctttcctcatgctgcaggcccggcagtctgaagaccaccctcatcgccggcgtcggcggggcttggagtgtgatggcaaggtcaacatctgctgtaagaaacagttctttgtcagtttcaaggacatcggctggaatgactggatcattgctccctctggctatcatgccaactactgcgagggtgagtgcccgagccatatagcaggcacgtccgggtcctcactgtccttccactcaacagtcatcaaccactaccgcatgcggggccatagcccctttgccaacctcaaatcgtgctgtgtgcccaccaagctgagacccatgtccatgttgtactatgatgatggtcaaaacatcatcaaaaaggacattcagaacatgatcgtggaggagtgtgggtgctcatagagttgcccagcccagggggaaagggagcaagagttgtccagagaagacagtggcaaaatgaagaaatttttaaggtttctgagttaaccagaaaaatagaaattaaaaacaaaacaaaaaaaaaaacaaaaaaaaacaaaagtaaattaaaaacaaaacctgatgaaacagatgaaggaagatgtggaaaaaatccttagccagggctcagagatgaagcagtgaaagagacaggaattgggagggaaagggagaatggtgtaccctttatttcttctgaaatcacactgatgacatcagttgtttaaacggggtattgtcctttccccccttgaggttcccttgtgagccttgaatcaaccaatctagtctgcagtagtgtggactagaacaacccaaatagcatctagaaagccatgagtttgaaagggcccatcacaggcactttcctacccaattacccaggtcataaggtatgtctgtgtgacacttatctctgtgtatatcagcatacacacacacacacacacacacacacacacacacaggcatttccacacattacatatatacacatactggtaaaagaacaatcgtgtgcaggtggtcacacttcctttttctgtaccacttttgcaacaaaacaaaacaaacaacattaaaaaattgagaacaagtatggaaagaatgaaagatcaaggaaaaaagaataccaagttacatttcgttaaggtgcttatgatcttagaactatgcaacctaataggtttgaaactgtttacctgagagagaacaaaaagagagacttttttgtattggaagtaatctgattaatttttattttcttcaaggagagatacttgaaaggaatatgtttgtccatctgttggatccaaacatttctatattttgtaaatgttgttgttgttttttttttaatcgtttactatttgcactacaatggtgtttgacctgtctaatccttatttaacaagtattttctttggttgggggtgggggtggggtttaagagctgcacttaatgtgagctataaaagaactgctacagcacacaaaatagctatttttattattataattataattattattattattttgtaccttaaaaaatagacacatacaccaaagacatttgtgtgagcctttaaacagtctgtctgtggttggtatcattcaccatcaatgagtcaggggttgggattcaaggttgagtagtgtggattgtgttcaggcttaaaagacctgagaagtttggtttttgactccttttacatccatgaaacaggacatttcatactggatgtacagtagttgtacactgttggatatcaagttcaatcaaattcatggaactacatgcttgtatgtgtatatatacattgcttgtgcatatgcatatctgtatgtatatatacatgtattgtaccatgtccatacacattttaagcacttcaggctgtcattttttaatgttcttaaagcaatgaatgtttgtgtgcaaaacacagtatttttaagaaggataggctatagtttttgcttttactctgaactaggtgggcgcatttcaaaaattcggatgggaaaaagcctggaaattccagtgaatattcagcaaggccctctttcattgtacagggatcaaatttcctcctcttttttgtgccccctcccacttctacaagttatcccctgtggggaaaacaggatgataatcaaaactctgggctgatgtttttccaacttagtgtctattggaatcaatcttaaatcagaagctttttcagaaaaataatatttaggccagaattagagttgagtgtattttttaaaaatgattaaggcttggttgtgagaaatattacctgtaccagctgggaaaaataatgtcatcactaactaaaagataattaatttgagagaaagtgttaagagagggagagtaaggaagagaacagttaagaggaggcagaggtgagggcagtagtaaaaatctctaaaattttaatttacagccaaaattcttcatgtgtaaatttgtattgattcagatgcagaaatgaaaaaaaaacacctttgttttataaatatcaaagtacatgcttaaagccaagtttttatctagtttattctagtacttagcttgcctggaatagctaataaattattcatgtatgtgcttttgaaaatccagagccctatttttacacacttgtgtgaagttggcaaacattttgaaaaatggaaaaaagtttctaataattgggaacaattacattaattaatattttgtaaaatattgaagcttttagccctatgtcaatttgtagattaaaataaattaattataggaaaggaagataacagtgagaaaccaaacattacaaaaggtggtttagctctccttgaaaaatatactaagttggtatactataacacttggctatatgtaggcaatgtcactactgggcaaatacacttactgtgttctagaggcagccctttcttatgcagaaaatacaatacgcactgcatgagaagcttgagagtggattctaatccaggtctgtcgaccttggatatcatgcatgtgggaaggtgggtgtggtgagaaaagttttaaggcaagagtagatggccatgttcaactttacaaaatttcttggaaaactggcagtattttgaactgcatcttctttggtaccggaacctgcagaaacagtgtgagaaattaagtcctggttcactgcgcagtagcaaagatggtcaaggccatggaaaaagcagaaatttaccaagaaagctgatacccatgtatagttcccactcatctcaaatacatctgctatctttttaagctaagtcctagacatatcggggataacatgggggttgattagtgaccacagttatcagaagcagagaaatgtaattccatattttatttgaaacttattccatattttaattggatattgagtgattgggttatcaaacacccacaaactttaattttgttaaatttatatggctttgaaatagaagtataagttgctaccattttttgataacattgaaagatagtattttaccatctttaatcatcttggaaaatacaagtcctgtgaacaaccactctttcacctagcagcatgaggccaaaagtaaaggctttaaattataacatatgggattcttagtagtatgtttttttcttgaaactcagtggctctatctaaccttactatctcctcactctttctctaagactaaactctaggctcttaaaaatctgcccacaccaatcttagaagctctgaaaagaatttgtctttaaatatcttttaatagtaacatgtattttatggaccaaattgacattttcgactattttttccaaaaaagtcaggtgaatttcagcacactgagttgggaatttcttatcccagaagaccaaccaatttcatatttatttaagattgattccatactccgttttcaaggagaatccctgcagtctccttaaaggtagaacaaatactttctatttttttttcaccattgtgggattggactttaagaggtgactctaaaaaaacagagaacaaatatgtctcagttgtattaagcacggacccatattatcatattcacttaaaaaaatgatttcctgtgcaccttttggcaacttctcttttcaatgtagggaaaaacttagtcaccctgaaaacccacaaaataaataaaacttgtagatgtgggcagaaggtttgggggtggacattgtatgtgtttaaattaaaccctgtatcactgagaagctgttgtatgggtcagagaaaatgaatgcttagaagctgttcacatcttcaagagcagaagcaaaccacatgtctcagctatattattatttattttttatgcataaagtgaatcatttcttctgtattaatttccaaagggttttaccctctatttaaatgctttgaaaaacagtgcattgacaatgggttgatatttttctttaaaagaaaaatataattatgaaagccaagataatctgaagcctgttttattttaaaactttttatgttctgtggttgatgttgtttgtttgtttgtttctattttgttggttttttactttgttttttgttttgttttgttttgttttgcatactacatgcagttctttaaccaatgtctgtttggctaatgtaattaaagttgttaatttatatgagtgcatttcaactatgtcaatggtttcttaatatttattgtgtagaagtactggtaatttttttatttacaatatgtttaaagagataacagtttgatatgttttcatgtgtttatagcagaagttatttatttctatggcattccagcggatattttggtgtttgcgaggcatgcagtcaatattttgtacagttagtggacagtattcagcaacgcctgatagcttctttggccttatgttaaataaaaagacctgtttgggatgtattttttatttttatttttattttatgtcttatttattttccatgatcaactttgcacacatattgacacatcctttgctgggtgataattttgtttttactgtaattatccagaagaggatgagaaacagactgaatgtgggagataacaaaagctggagtgagagagctcaagtagaaaaagaatagattttgccatggcagaggctggtaatgggctgcagatgcttggatcagcaatatttatattttattcttttgttgatttcccatttcttcaagtgtagtggcaactactcacaggaaatgaagagatattcattccttccctccctctttccttcttcctcctttcctttctagctagaaaactggaaatgcatggagcaactagagctagagatctatatacatggggaaaaatgtacttagtcttattaccgggaccaacagagttggaatttggaattacagaagtaaggtcaaacattaattgataggtcgaccttttcttctataatttttctctattatctgtgcccatctcagagtttatatggagaaagtaacttccaaaactgctcatttggaccaggaatatcccatgtatggcctcatttgatattcacatatcattgttttaactaccctgcacaataggtgttattgctgcttttacagatgaatctgaggcatgattgagtaacattaattggaattaaaattccaacccaggtctatattcaaatctaaagttaattttctttttgttcttccataattgcatttttgtgttaattttcttatgtagtaaaaaaaaaaggggggtgagtggattgagtgttgaagtcacttctaactttttaacgcagagacacttcatacccaccagatagttcactggcacttatcttgaagtgaaatgccaagttcatgtaagtttatcctaaacgctttttactttagtaggaaagtttctattttcaaattagaaaatgggaattgttagttttgctttatatttattactttgtcttatcttgctattctcatattttgctaggggtaatccaaagtactttattttactttgtggacagtgggacatttgtgtgtgcatgtatgtgtgtgtgtgcctgcaggtacatacatgagcacttgcattagcctttatttcctgccaagtttaataatgaatacattttagggatgaagtaaaaacttcactgaattataaacgagtaaccttgtaatgaaatttatatggatattatcataatcaaggtgaaaattactgaaagaaaacaaagttaaagtcaggtatagaaaaatactttgaatatgcatacatatgtatatatatatgcacacatatgtatacatgatatatatgattatgtgtgtgtatatatgatatctgtacacatatatatgggactgagaaagagaatgtgtcatcatttaaaatcaaaatccatttcatataggagtttaatcctttcttagaaaacaattgtctgaggagttttacaaactgaaaaagggaatagaacagtgtaataattctttttttctatcaaatcaagcaccagctccttcagtagaattccagtgtttctacattaatccaacttcaagtcttctttcagccatgataagtcaggattcattagaaattctccattacacccttttaggcttttgttaattgttctgtaattagtgcctacagtaagaaaaataggaaaggcaaactgtttgtccacaagcaaagaaccacaaagctgtttcaggctgcttagaaatgaacaattacctcgtttgatgatatccaatttcaagaagagcccataattctgggcgttctaccatgatttcaaatgatctcagcagataccagagaagcatctttcttgcagaaaacttgtcagttgaaatctggagatggttttgggaaatattaggccaactgagtgaacaaaaatgatgaagaatgttttttggtttagctaacttctcttcaggaacacatcaggggaagtgttgagagaaggtcccatcattgtcggaaaacagcaatgaaaaagccacccagggctagagttaatgtcctgctgtaattcctgctgtcatggtggtggtggtgcctgcatcactgttatacaggggacccaatgttctaacacgaatactataatatggcaacaaaagttcccatagaaaatgcctttcattaatgaagttttatcaacatggttgagttccacagccaaaaaccatttaaaaagtttggtacttacatgggacaaaagcaatcattaaagggaaactcttccattgtgaaaggaagaaaggaaaaaaagaaagaaaggggaaaaaaagacaaacagtgctaatctatgccagaaacaggcaggcctaaggcaggagaatgacaaagcattgtgcttcaaagtgtttattgtgttaaagcttccaaccactttgaagacaaccatcaaaccctcctaaatgaaaccaggaagtcttcttgccattgatgtgacaacaaatgtttgtgtttcatggctgatctacttatccctcaaagactctaagttgtcagtacataggatattttttaaagataaagctaattttccatctgagtaatcatatcctaaatgtgatctaattgccaaccagatgaaatgcttaggttctctcagtggcatacatttagtagctattaatataccaaatattatggggttcgcacttctgaaatcaactaacttctatgttctcaaaagagtgaatttaaaccagtctccatcagatcatggactagcccatactgccatgaagttactaatggcctcgaattgaaaacccggagtaggcaaatagagtcctttccttttgggctttggataagatatgtattacaatttaaaatctagctaattgggctgattgaatcattaatttaaccgctgtatgaaaacattctggggacttaagagtgatctacaagctaaatactgccaaggttaacagatggggtggctttttgattgccttaaagcgggatggacagcaaatgttagctggtccaaccaatgtccccagcaagccaagtgtcagcagcttcaaagaaacaagacaagcttgccttccttttcccaagacagcaagttcccagtccaccacctgaccaccccagcttactcctgctattaggcatcactggtgagtgagaaaaggtgataggtgaacagcttttatctttgggctttaaacattttacaaaacagggtatgtaaccttaacccattattgtattgaacaagcacacatttatgattctgactcaattcatccatcacccagaactgatttttaaagtaataagcccagaattgatagtagatggattaagcactggaagtaaattttatggaaaaaaaaatccctgtaataaacaccattcagatgatcatatatgggaaaaaagtagatgcaatctaggagcaatgaggtcaagatcaaatgcctttctctatcctctactgtgacttagatgtgtcagggaatagtctgatgaaggcatgggctggcccttgggaatcaaattgcttgagatttcggccaggtgtggtgactcacgcctgtaatcctagcaattcaggaggccgaggcgggtggatcgcttgaggtcaggagtttgagaccagcctggccaacatggtgaaaccccttctctactaaaaatacaaaaatttgccgggcatagtggcaggcatctgtaatcccagctactcaggaggctgaggcaggagaatggcttgaacccaggaggtggaggttgcagtgagcccattgcaccactgcactccagcctggagacagagcaagactccatctgaaaaaaaacaaaaacaaaaacaaaaaccaaacaaaaaacccagattgcttgaggttttgtgttgttgttttcctgaagaagtaggtgccaggagaaaatagggtagggaaagtctcatcctccaccagtcaggcttcaaggacttatgcccagaccagcagagagaagggctgcaggcagcaatggaagaatccttttacatcaagaactcaatgtaaagggggcactcttggtccccaggtaacaaattgtgatactctatggaagagaggaacattttctctgattttgcttcaaagacagcatcatggatgctgcatgaaaaataggccaacagctttgggggatctgggagaatggatcttccccagtttttggcattcacaaggtattccctggaagtagtggtggtgtgatggatctccgtgagagcggggcccacatgagatgcccgagggttcccagacataagcttagggatggggtatggagctgactaaggtctgtctttgaggcagtgaggcaagagctaatgaaattgggtccatttcacttagtataaccttgtctgcttttacagacttgtaagagtggaaggaactccatttacagtagactcgcacacagtgacacagaaaagtgtggtagatccttaaggaatgttagttgaacccaaattcaaaaacaaaagttacaaaagaatttgtcttactaaaggagatctttacaagcaactgattttttgacaatttgagagacgaatcttagtcaatttgagggagattttgtgtaaaaaatgaagctcaggaaataatatctgaattactgaaggaaggagttagacaaagttaggagccagacttgaaaacagtgcctcccggactaaggtagctgagagacactatttacaatgtgtatgagtataccacatatttattttaaaaactcctatgatggtgttatgtgctgggcattgttctgaatgttttaagccttataaaaactctatgaggtagagcttctgcccttggctttttcaaaggtggatcttagccaccattccataggttagaaaaacaaactattttggcaaagagtagtgcaataacttgtccaaggtcaaacacctatgatgcgacagagcgggggttcaaacccggggaagccctttaccagccattgaacttccgccatgtgtcctactacagtccaccatgagcatgattcctgctcctccataagtctgctgatatcacaactgtgtccttccactttactatatgatttgcatatttatagctgatacaaccaactacttatccggctggtgatctacagagaggagacactagcgaggaggaaagaatgctgtatcatgagtcaggaaatccaagctttatcctttctcagtcactaaataactctgtcattaagttatatttacatttttggtttcaatgtccacatctataaaaaaggccaagtgagaatctctcaagtgtgattcagccttaagacactaaaatgcaaagtagctagacatggataagacatggatctcttggacacagcttctgcatcttcctttgtaatagatcttatcacaaggacctacctaatcatcagatatatttttaaatggactgttactgtgtgtttgacgtcccaataagtactttttgtcgtaacagcaacaacagtaaaatatttgacttcaatacttcctgtaggacaaaaacaattgtcaagaccattcatccaagttgactagaaaaattactgccgaataacccatgttgcttttaaagaagagactaaagcaaagagatgaggtttggatacatgtgtttcacacttagttatgattagacagatatgttcagatacagctttctattttgttttgggcatgttgtccagctatcttttgcttgcatttctatatttctgggtctgtgtttcactttgcacatgactggattttaatctcttttctctttcactctcttgatagagtttctgcttctatgtttttcttttctatcatttttcgtatttctagagagcattctttctttggctcctaaaagccagaaaggaaggtcattaagagtaaaactacttgggcagggaaagtttcagatgggacttcattctttagtgcagaaattctccaactttagtgtgcacagtcatctgggaaccttattaaaaatattaaaaataaatattccatgcttcacccaccagaaattttgagacagtagatcaggaataggactagagaatctacatttttagagaagttctggagtacagacttagcgcttttcattttaaaaatcattcaacaagtaaatagaggagtaggcctctgtgaagatgaggtttttgttttttgtttttgccaaaaggtaaagacagaccaactagaaaaactgaaaagtgccataccgtattggtgaccctgaattcttctttggaagcaaataaatggaatgttagtatgaactggccaaaagccacctttgctcacatctgggtatttcctctgctcagatagtcttttccaggttcatggataagaagtatgagcacatagtataataactgcagaagtagaagtaaaagattatttactttgatctaattaaagatgcatagggttttaaatggtatgtttagggcttagtgatatatttccacctctgttttttctttagatataagataaagacaattttattaattgtataactttatctttgagaaatgtgaacttagttttatatgcctggttaatatgaagcattaacattactagaaattgtgtacacatgaagaagtaggagatgtgttgcgtcctggattgagtactaaatgtatttcttccaggctgtctttttactcaataatgtgaccttgaactagatgctttgattctagattttttcttctgtagggcagagccaattatacgtatttttcttatgtccctgtggtgcttagagtgagctcatgtcaaaccgctttagtaatttaagaatcagaatagtgatgagtatactccttttatttctttaatccataaacacaattttccaggccattgatttgtttctaatctttacttttctaattcaatggctgaatgttgtacccaaaccacctcaatgaaccactgagcaatgaatttatgataaagaagcataatctgtttgatacatagttttttttgtttgtttttgtttttgttttgagacagggtctcactctgtcacccagactggagtgcagtggtgcagtctcagctcacggcaacctctgcctcccaggctctagtgattctcctgcctcagcctcccgagtagctgagattacaggcacatgccactaccactaagctaatttttttttttttttgagacagagtctcgctctgttgcccaggctggagtgcagtggtgcgatcttggctcactgccacctccacctgctgggttcacgccattctcctgcctcagcctcccaagtagctgggactacaggcacgtgccaccatgcctggattttttttgtttttttagtagagatgggatttcactgtgttagccaggatggtcttgatctcctgacctcatgatctgcccgcctcgccctcccaaagtgctgggattacaggcatgagccaccatgcctggcccccaccgggctcgtttttgtatttttagtagagatggggttttatcatgttgtccaggttggtcttgaactcctgacctcaaatgatccacccacctcggcctcccaaagtgctgggattacagttgtgagccaccatgcctggcctgatatatagttttcaaagtatgataaatacactattttcaatgtagttcttaaagaatgatagtgaccatgtgacacaaccttggttaagctgtatttctgatcgcacatttttaaaccttgaaggatgtattttccatagtgttttcaagtagagccaatctcaaagtctctttggattgttatgctacacatttaccatgtcactctaatgtaaagtcattggaaatgcacttattgtagacctgtcacttcccggagacctacaacaaaaaacttttctctttgaaaaggtagaagcgcccctttggcccattgagagggtacatgctattagaacaagtgaagctgagttaactgtcaggagaggaaagcactggtagatgtttctaatcattatagttatacatgctgtaatgtttggcttccacgtagttttttttttcttagtgagtgaatttaaaaataagtaaataaaattaaaacataatgaagagaatagcttcctagttaaataataacaaatttcaggttagccagttagcagctctgtggcattagacaagttatttaaattcaataaccatttttccttctctttacatttggaatagaaatgtatattcttgatagagctattcgaaaaatttcaagtggaaagacatctaaatagtggagcttagtgtttgacatggtgagttcgccatcaattcctgctagaaatatttaattatattgataaggctccaatctctaagaatgttcagaaatacctccctcgatcataccctgggcccaagcattccaagacactagttttgacagtggccccttgggatgttttaggaatagatgtggctgttgtttactctcccaaatgtggttgttaataaatcatagagttgtttttgacccaaacatctttctttaataatcctactataaatattcatttgagcttaggttacctcttgaggtaacaaattctattagtttaacatataaattaaagtagcagctaatttatttgaattgatagaaactgaactgtctcttgtaaagaatgcttattttgtatataattgaagaagggtcttttaaatactgaaaaaaatagtgggctaggcacggtgtctcacacttgtaatcccagcactttgggaggccgaggtgggtggatcacttgaggtcaggagttagagaccagctgggccaacatggtgaaaccctgtccctactaaaaatacaaaaatttgccgggcatggtggcacgcctgtaatcccagctactcggggagctgaggcaggagaattgcttgaacctgggaggcagaggttgcagtgagccaagattgcgccactgcactccagcctgggtgacaagaatgaaactctgtctcaaaaaaaaaaaaaaaaatagtgtatgtgtggctctaagaagtagaaatctgaccaagcaggtttaaataataagggcatttgttgttcatatagttgaagaacaaattttcaggaacattgtaatcacggcaccagctctatgatcttatagtcttctgatagctccattcatcagtatttagacttttcatcaggcatatgatcacaaaaggacccttaggaaaaacctgggcattattcatcttcacttgtattcaggatagattgcttctgttaaatcaaatttagcctaaagctgcctccttacatattttaagttcagcctgagggtttctctgtacatcatgaagtattattgtaagtggaggggtaaacaggtggtagcctacacttgtgccaatcgccgagttttggccaatcgaatgtggacaattgtttgaactgtgttcaaacaaggtaaacgccaaaccataaccaatccagttgtttctgtacctcacttctgttttctgtacatcactttcctttttctgtccataaatctttgtccatcatgtggctgcactggagtcccagagcctactctggctcaggaggctgtcagatttacgaatagttcattgctcaattaaactcctttaaatttattttggctgaagtttttctttaaacacttcccatggcattcttttaaaagcaaggaaaacatttcacaaaagttactggtaagtcttccctagtcactttctgcaccaagttggcacagaccaatcacaaggacaggaatccatgattgactaagacaaatcagaaccaacttccagagatagggtcaattccctaaattgctttgctactagataatgtgggactggatagggtgaatgatagagagtcaaacatcacaagtgccagaattttattttaatatacttgagggaactctttgtacagttttcctatgttctatatccttaaattgacaacaccgaacataattttgccttagtttttggatgatgattcagaaattgttcaggtataatctcagtcacttctatttaataaggcaggtctattttttcttaaactaaatagtttctggatctttttgaattccaggactgctcttctaaatactttgtctcttcagtcattgtgatgctaacaacttaagttcctgtgatagatagcaatctccttcccaattttactttgctatgggagaaaatattataggaaacctcttaatggatcccacttaatttactttgtgattgatggacgattctgatttccatataaaacacattgcctgatgctctcagaagattgaatacgtgcaactagtgagtcattctgtgaatttttgctctcactagttgaactgtatgcttattgagggtcaggcatgtttgttcccaaacgtgtttctgccagttgtatttgggagtgtatctcataaaaatttaagaaatcaaagaaaagcaaaacaaaagttaacaaaaaagtacattgtatctataagagttaaaggaaggtcactaaaacaaaaccaaacaaaaaaaaaatggccatagaagagacagctataaaataaaaaacactaaatatagaaaggttctaaatacacaggtttttgcagggatctttaagtttgtgttctacttaaagaatcccaaactggacattgtagaatatgcattataaatgtgattcatacaagaaagataatggcaacctctgatcaatagatctactctcgaagaaaaagccttggccatgaatcaaaagcttaatgaatgaacatgcaatgacatattttaagttaaaacctaatgttaagtgtatatattattttgtataattatcctctttaactaacttttattaactaaccaacttcacctcagccaagaagactcatggtatactggaagggtgaagtagaaagtgtgtgtgtgtgtgtgtgtgtgtgtgtgtttacatgtgtgtttgttggtaagagatggttgttgggatttaagagtcagaatgctaagtctttatccaatgtctaagtcatttagactttagacaatgtctaaagttaatgaatcaaaaatcgtataaatatacattctttagcacttaaaaataactactcaaaaaaagctaaaagtgttgaaaaatattcgtctttggaaagtggagttatgatagtggagggtgggctacatataaaggctattgttttcactatgtgcttattgtttctgagttttttaatgatgtataaattttactcttataaatatcaacatattaaacaggagcatctaccagtcctgattttgctgtggcagccagtctctatctaacacagcctccacagatattggcttcctgtatcacacccatgtgtcctcccctcccacatctcatgtcatatcaggttggtatatgtggccaataagatgctgcagaggatggcaagtcagttctgagattagattagaaaagaccctgtggctttgtcagaggcattggaaccagagcaactccattttgagtgagggctagggcaatgaggatgagacgtgctgggctgcattctcagaaagttaggcattcctggactctagatgtttacagttaagggaacaaattaatgatgtttacttaatagacccagacttgggagtgtccagatatccggatacccggatgacaaaggcattcctaattttgctttaaagataatagtattgaatcttgcaaagtatagtaattaagacaagtaatcctttatcacaaactcttgtagcagagcatatctccccatttaaataagcattgtacctagggtagatgcgttcctcctgttactttcaggaacactctactctgtctatggagtagctgttctttcaccactttacattcttaataaacttgtttttaatttgcattgcagactcgccctgaattctttcttgcgtgagatccaagaacactctcttggggtctggatcgggacccctttcctgtaacagcttctgtctccctctttctctctccctccccaagtgctccttcagggggaagccagatgctgtcttatgagaggccttgtggagaggcacctgaagcgaggaactgaaccctcctcccaaatcctttaaatctcatttcttatttgtaaattttaaataataataccttccttgtgacttattgtaaagtttagatataaagtatttaaagttcaagatacagacccacaatcacagttgaccttatcattctaaagattttaattatcgatatatttcttaaacttgcccaagtcattcagcttgcatgtggcggacatacgaatctagaacagaagtccattatctggggtgagtactgtggaattgcatgcttccagaaaaggcaagatagagaagaaaataaatattgtgtatatcaactcagactgatgagaatggaggaaataacctactagaaggcttttgaacaacagaggagcttggtggcacgatgggggcaagaggagaggagtcaaatgtgtgagcatggattagctttttattggaaatatggagaaaggtcttcatgtctatcatcagaagaaagatcaaccagaaacttcctagaaatttgaaccagagtctcagagtcttccaggtttgtagtaaggcaagtcagggctggtgaagttgttaaaattgagccaaaaacagatgacaggttttggtaggaagttagaagcgctcattttgactggaaggcagaaatgaagtaagtttagaaaacagatagtgactccagcagtgagagattaaaggctaaatgaagagaacagaggacaggacatggaaggcccaaaatgaaatgcttgttctgggtcttgtgacctgagaatcaagagactggtcattttaaggaatacaatttctaaaatgtggcaaaaaaattagttgtgcatttgaacaattgggtgagctggataggatgaatgctgctcaagacttgggcagaggaatctgatgtcggtggtacaggatttgggggagaccattttcctttccctgcacttggtcaataaccatggttcaccctggtatcctgagataccaaagcctgattagaaaaaacaggctttgttgggcttttttgtctgtgtatgttgttgtttccagattgccaacttcttcagtttcaggtctcagatctaggaaaaaaacaaacaaacccagagaactcaccattatgctgttcctctcgttgtaaggttccaatagttctgcatcctttttttccatccttcaaagtcttctcgagtttattttatacataacatccagggtttttagttctacttagtgggaggaagaggaaaaagtaagtctactccatctacccagaagtagaattctgctcctctgaacagtattttaaatttcttgttaccattctcaaatccatattgctcaaatagatctgttccaaagagctctggcaagtgagtttgccttattgaatgttttcacctggacagaccgtgaaaagctcaaattaaacataaatgtatgggctcactccttgctccttagcaccttagcactcctcctctttttactctattctggttattattaccacatggccatccaagctggaaatcaggagctattcctgtctgcctttctttccctcacctgccatgtcttagacagctaagtactaagctgtgcccacctttcctttcttacccattacctctgtgggtttcagcatattccatctccagtaatttgtatgatcttttgttctaaacattctcctcttgcatgtttgaaacttaatgtgacccccacttttctttctttctttttttttttttttttttttttttttgagacaaagtctcactctgtcacccggactggagtacaatggtgcgatcttggctcactgcaaccttcacctttcaggttcaagcgattcttctgcctcagtctccccagtgagtagctaggattacaggcactcgccaccatgtccagacaatttttgtgtttttattagaggcgaggtttcaccatgttggccaggctggccttgaattcctgacctcaggtgatccacccacctcagcctcccaaagtgcagggattacagacgtgagccaccacacccggcccatttttctatcaattattgttccacattttttctgtcctgtatggttactcacctttgcctatacccaaaagttccaaatgtcatcaactctatgattgacatctctcccatcagcaccttcctatctatttccactctcatcatctgggtcttaaatactaacagagctgtactcatatccacgtctgcatcccctctcatctgtgttattgcagttgcctcctaattgatccttcctcctccagtctgcagcagtctttcttgtacactgtctgattcattttcttaaagcaatgtttctcagtgaggttctcctgcttcaaaacttccagtggctcttgattaccagtagaattatgtccaggggtttcagtttgatgctggagattctccatgatcacatcttttatgttgagtttctcttctgagttttgttcatttctctcccccagaccctgtcggccctttgcagcaaccccaggcaggttatgaatgatcagctagctcatcctgaaccaatgctttaattcaagggcaacacagattaggttgtttggtttagtacttctggccttcactgcatgagatgtaaggtgaaggagggaaaaaatataacagagcaaagatgagtgatgtgaaaagatgtagattttttaaaaaatcactccacgttgaagctatcctgatgtaaacaagagtgctggggaagtcatcctccacaggccagaggagggaggtgtgggctcccagtgggccatgcctgtgacttcaaagatacgaatgtaccagttggcaataaatatttataaaatgagacataggtatttagaccattagcctgccacatagtccttctgcacaataaaacacaaagcttaaatcatgataaaaacaggcagaacaaatagtagtggacctaaattgaggctcgggtaaatgttcagatttattttaaaacacggatctgtgcacatgggcattatatacaaaacaagattttcaaatggccacaactgttttgcattcatctccctttgtttcttttttattttttacaaaaggaaaaggttttctctaaactcatggtctcttttcttttgtcttataacacttcatcatatccaatatgacttgggatatctttgccttgtcaagtcatgtgattcatttggttaaatgaaagaaagaggcacttgactctcaggaggcacatttgtttcatcaaaccaaatttttaaactttcttcaaagtgtaagctaagcaatttccagctatctgtctaatgtagagcctttcttctccacagatcttcctttaaatttacctaccacaatcacaaaccaataagcttcaggaatgaacatacgctgttaagttcatagaaaggtttaggtgaaatgtaggatttattccaaattctggcctttctgaagtccttgctgattataaactaatggttgcattatctttactttgagaccgtgggaaacaactagataatgagacaaactcacttaagtgaagcagctagtgcctgacagaggtttaatgtgctataccttccaaatgaaagagactgccttcccaggcaccctcagcatctctacctctgaggcatggctgcagattggggggtctcccagtctgtggcactgtccaaaccctgtcactgagaccacctttgtaaaaattatgacagtgagaaaattttgaccgtgaaagagatctgccataactaactctatcttacctttaacctccaaatttcccttggtcatttctgagtgtgggacaaactaattttgggagaaatttagtttatactttaaatgacaattgttcttccccaaactaaacttcctttataaaactaataaaagaccaaaagtttaggaggatgagaggggcctgaattctgctaagatgttggtggattaccagccattgttatggaggtcatgagattttttaacttctccaagtactcctataaataacatcactattgtattaggttggtgcaaaaatagttgtgatttttgccataatggctaaaaccacaattacttttgcacttatctaatagagcctaagactggccttttgagatgtcttttcagactgtggatttctgatgactggatggctccactcagacccatgactcatgacaaccatttttcacacccctaccaatcagcagcacccattctctagcccctgcccaccaaactatctttaaaaacctctagccttcacatttctagagaggctgatctgagtaataatacaacggcagtctcctgtttaaccatctctacatgtattaaactctttctctattgcaattctcttgtcttaataaatcagctgtatctgggaagtggcagagaagaacccatcaggcagttacatcatttcagcaaggactttaatggatagatgtggggattctggagtataagctccagaatcacaggatatggcatgggaaaatgaacatacagcttagagtttagtggtaaaagattgagtttcacttaaatgaacttgaaccagtgatttggaatttctggcctttagttctctcacttataaaatgggaacaataatgagttctcagtgtttttgtgaggattcactgtggaaggtctatgccctcttctccctgctgctctcattgcaggaaggaacagcttcagccataggtgacagtggcacacatctcactgaagacagagaaggacaagttgaaaacatggatttttgtgttgtaccatgtcttatgatggtatcattcaacaatttttaaaattagattttggaaaacatttttttatcttctacctcattgtattctttcaaccgccaagtgaagccaggtaaaagaattatgctcgccagcaaaaaatgagatacacatgcaagaattgtccacagccacattgctattttgtttagaagcctgtcaagaaacttcttcatgtactcctttatgtaattcaatagaattacaaattctactggcaaagcccctttcaattgaataagaggaattaagaaatttccaggcaagaaacctttgatggtggcatccattaaaagttttagggatgcaagaagttttccataaataaacttattatttttaattttcagttgagcctagcttaaaaaatctttgtaagagaacatgaaagaagaataagtctagtttcgatacattttatgtttgaccagaagggctcctcagttcaattactttgtttccaggtcagaatttccaggtcaggctgattgtggcacccatcaatcaatatttgtagccctaatctgaagctcactggataccattttcatacattgacaatgggtaattgtaacatcttgaaaatgtatattttaaagatgagtatgattgaaatctcttccatttctatttctccttcctgcagtactttaagcctcactgccaatttacagagcacagaataaaacagaagagaataaaatgatatgggttgcagcttcccagttgtaacgagcaaaaggataggagcctcagactcttagttctgaaccctgcctgggtt

SEQ ID NO: 75 - DNA, 4383 bp, Homo sapiens
ggcattcattctttcctttctgtgggtgtggggaggggaccacagggcacataccccaccctgggatccagctgagcaggggggtcagagatgacagctcttccggctcacaggccaccggcccacatacagggcaatcagaagaaagaaacagcacaaggaaggcacagagggagtcgttgtccctgccagaggtgcagcactccgggaatgtccctcactctccccgtccctctgtcttgcccaatcctgaccaggtgcagaaatcttgccaagtgtttccgcaggagttgctggcaattgcctcacattcctggccttggcaaagaatgaatcaacccaccctagatcccataaatagggccacccaggtgagcctctcactcgccacctcctcttccacccctgccaggcccagcagccaccacagcgcctgcttcctcggccctgaaatcatgcccctaggtctcctgtggctgggcctagccctgttgggggctctgcatgcccaggcccaggactccacctcagacctgatcccagccccacctctgagcaaggtccctctgcagcagaacttccaggacaaccaagtaaggggccaagaggggcacctgcaggcagggcctggggaagagtgggagcagaggggaggagaggtgaagagactcaggaagagcgttgggcaggactctaggagtccagggtccaggtttcagctcactctgtgccaccagggtcccctggtggaaaccatgccccttccccccatccccaccccctctcagcctgaacagactcccccaggtccacatcccctctcccataacccccattgtccaaagaaggtgggagcacttttagtccccctgcacagatgaggaaactgaggctcaggaaggcccaccagccacatgcctcctccagtgaggaggtcaccctcctccctgccagactcagaaccgcctcttcccccaggactcccttctggactgatggcctcctgctcctgccccttcaccagtgcaggcccagcctgggccctgctgcccagctagaggggctcatggttccaagctgggcggcccagaggtgccacagggacagagctggaggggtggctcctagggccattcctgggttgtgcctcttatcagtcccttgcagttccaggggaagtggtatgtggtaggcctggcagggaatgcaattctcagagaagacaaagacccgcaaaagatgtatgccaccatctatgagctgaaagaagacaagagctacaatgtcacctccgtcctgtttaggtgagggccgacatctcctgggggtgtgagagtcagactgacgtcacaggcaagggatggccaaagctgagggatcctgtcgttcacctcgctgttctgcccggaattcatctgtgttcatccttcctctgttccttagagcaacgtttatagcacatttccatgcagacacacagacagtggtggggatggacatgcacagtcgttagaaaacaagacggagagaggaggggtgcctgggagcgggaggaggggacactggatccagcctggaaccccacccagtgccttcatggaaggcttccagggaggtggccttaaaagagccaacctgcttcaaaaggaaatgtggggtgttcccggcaggggctggagtcagagagagcccccccttcaggaaggagcaagccatcgcagggtcaccctgagcagagctgctgagcagcctggaggggcaggtggccacgctagcacctagcacggtcctcaggccccgccccagcggatctgctgcggagtggcttagagcagggctcttgggccgcagggtggggagacttggtggggtgcagcctagggggtcgggagaccagcgaaagtgaagcggggccgtcacaggtgtgagagaacaggcgcagggtgaagaggcagggagccagggatcagccgcccccagtgggtttctgactctggcagctgagtggattgggattggggcatttgtggagcaaggagcagaatacagacaggttggggagctcagccctggggtgccaggggatgggaagtgggaggactcaaggatggggtcaggtttgacccgagagctaggggaacggctggcatggagcagactggaagtaccgaggtggatccccgggagagggtataggaagggaagcagcaagctgagtgcaggggagaaatgcagggtttctgtgtgttgggtggcggggggggtgaaagccacccagggaggcagccaaaggaaagaaggacatcgggtgctggagggtctgagtggggtccaggggccccaggcaggccaggagggacagcctggtgtcagctcagggagaaggcccaggcccatctcggctgggtggggtagggcccctccaggtagtgggggatgagctgtcacgggttgggccggactgagagcaacagaaccctgctgctgccctggccccaccttgtccagcacaggaggcccaagcctgggttgtctcccctctcacccacccatctctccctcccaaggaaaaagaagtgtgactactggatcaggacttttgttccaggttgccagcccggcgagttcacgctgggcaacattaagagtgagtcttgagtgaggtggggcactgagttggggctccggggagctgggtaggggcacagaccttcctgcccctccacacagatgtgttgtatggggagaagcccacgttgatgggctggggagggaggggacagctccctcctcccatccagggcagggctgacccctcaccgtccacgcctgcaggttaccctggattaacgagttacctcgtccgagtggtgagcaccaactacaaccagcatgctatggtgttcttcaagaaagtttctcaaaacagggagtacttcaagatcaccctctacggtgggtcctctcccatcccctcggggactggctcctgatcacacttagtgggaggggaggccggtcccccatgaggaagggatctgaggcctcatctactcattcaacgatatttatgtggtgtctgccagccactcactggccatcttggtcacagggagaaccaaggagctgacttcggaactaaaggagaacttcatccgcttctccaaatctctgggcctccctgaaaaccacatcgtcttccctgtcccaatcggtaatggccagtctggatgaggggacggggacatggggactgttcaggcaggatgcttccctaccagggatcagggagaggagggactccgtcctcagcttcagtcactggagcagtggatggtccaggagctccttggaagccactctgggcccaggaagactgtgccccaccccagggtctatgggactcccagggacccaggccgcaagtgctctttcctggcagtttagcccgggtctgcccagacaaggatttcaggcccaggcctgagtatccatttctcagtctcactggcctgacacctctggccaccctcccaggcccccttgttctgggccatctcccccgaccctcccaggcctcgtcaccctgggttttgctgtcctggctgtcctctctcccctggggacttgctcaccactgacttgggagctgtccttgactccagggagcctggcttgggcaggaggctccagccaggccattcagagagccactggcctcccccaggctgagagactgcctggactggtaaacaggcaggagacctgggtgcccgaggagcctgggagctgggcctcactcagggcagcccctccccaggcctttctcccacatcccctgccctgccatccacccctctgttgccccatctctgaaaggaacccccatatcttctgcagctgggccaggtggggcaggggctgcccaggggcagtgcagaggacctggcagtcagggatcacacacacacactcatacacgcacacacacacacagctgcctgttctgacggactttctccctaacagaccagtgtatcgacggctgagtgcacagtgagtgtggctgggcggctgcgagggggcttgtgggaggccagggtgcagtgggctgggggtcttgggcctgcctttgctcatccccctgccccccagcactgctgctgtctttattctgctgtccccatctcgggtgcctcccatttccccacccatcaccctcatatccacctctgtccagggtgccgccagctgccgcaccagcccgaacaccattgagggagctgggagaccctccccacagtgccacccatgcagctgctccccaggccaccccgctgatggagccccaccttgtctgctaaataaacatgtgccctcagg

SEQ ID NO: 76 - DNA, 1500 bp, Homo sapiens
gccggagcgcggcgccactgcgcctgcgccacagcagcccggggagaggtgggctgggctgcaggtcctggcgttgtgctggatcatcgcgcccgtactctgaagttttctccgtggcgctctttgagaggggttcctcctgcatcttgagaatattttgcatttcggctcccttctcttctcgctgccatcggatgccccaaataggtcctgtcccctcggtgaatcagacttcggaaaccgcctcgcttcagggtcagagtccaagtacagatgagcttgaggattctgaatgcacgcccggctctagaccttacagacacacgcttggacagacttctccatatacgacccaggaacggaccccttgagaagggattcttcaagcccgctgccctctccagcgtcctggccagtggcatcgcgttcccaggaaacctcgcttcagatattgcccaccaccccgccctattcacggttcctgggtcttcctggaggaatgacatctcagagaatgcggactcctatgttcatgtcatttgagccgccgcgtcccttatttgatgtaccccttgttggtcccggaggatggcaactagacaaaaggtcacaggcccccacacccgctccataacggcttcttggctttttgtttcttttaagcaatgaggaaagagatgactttcgtgaaaacttttgctggagaagagatccttccctctgtatatgtgtgtgggatgggaagtgtcagactcagacctttagttccttgagatcaaaaaggtttcgtgtttgctttcgtctcttctttgcatccctagcgtctttaaaagagtaggcaggcgcggtggcacatgcctgtaatcccagcactttgggggtcgaggcgggagtatcacttgaacctaggagttggagaccaacctgggcaacatagtgagacctccatctctacaaaaaataagaaaattagcccggtgccagtggtcccagctagccggtaggctgaggtgggagaattgcttgagccaggaaggttgaggttgcagtgagctatgataacaccactgcactcctgcttgggtgacagagcaagaccctgtctaaaaactatatatatatacgtgtatatatatatatgtgtgtatatatatatacgtgtatatatgtgtgtatatatatacgtgtatatatatatgatgttttctattttattttatttttgcaccttttgtactcctcctggagttcatcctgacagacagaggtttgtctggagccagagctcacaaatagttggaactgccctaaggatgccattttgttcttaaatataactagcaaatattactcaaagctgtgcacgatccccaaaccctggtccccaataatttgaataatctgaatatgcaagttaaggtattgagatgggaaccctcctgtgtggtatatcttgctcttatcctttgtgaagccaataaacttcaatttctactctca

SEQ ID NO: 77 - DNA, 65669 bp, Homo sapiens
gtggtagctcacccacactgcaatccatctgctgactcaacttgctagtatcgggcagcagccaggaccacagctcctccagctcctttgtgaccttttccttcagcttcttcaaatactgggttaggtaagagtgcgacctggtaaagatgacagctatcctgcaggtcattcacaccatcaagattggaggtagtgaaaaagagacctacattttgagcttgtatttgtttccccgacttcatatccattttcccttcctgctggccctgcttacttcagccccagcacaaagaacaggcgaaagacttacaaagactgcttaaccagctcctgcaacgaagtggggcttaatccctagaaaaaaagccctttattctgtcattcatggtgattctgtttctccagttaggttctaattgttacagccacttgatggtatgacttagcaaatttttttttcatttccctctgacttaagtttcctctcttgtaaaatctgtataacctacctcaaagtgttcttttaatgattacattaattgtttttcttaaaatttttagacacctgcctggaatatagtgagtgttaggtaagtacttattaaataaatgattcattctggccaccaaagcagaagtaatctatttaacttaacgactgtatcactttctaattctcttatcttgccgggcaattttgttctgcattccatatggttcttcatttgcatgccttccattcctttacaaacatgatgaggactttcatattttagatattataaattttgaaactgaacaaatgttctctctttaaattgactgctaaaggcatagaacggaatgcatattccactcttggtaagtatatggtgtatgtggtttgtatgtcatacctgaacctcctttgtgtcccagattttatttctattttgctttatattatattatcttatttaatatataaatatatatctatatgtgtgtgtatatatatacatatatataaagagagaagaaaataaaaatatttactctaaaagacattttttgacatattttgaaatggctgctgcagggtcagctaacggaagtggccttgcaaagctgtcttttatgtggaaaatttgcatctgtagaaaacgtccattaatgcagccgggcctcctcttgctaggcatttgctaggtataggagagattgagattctgacacctttaaaagtctaaaaataaacatttgccatcttgtctctctgaagaagtcttcatctatataacaaggtcacctttgctagtcaagcctcttcctttctccctactataacctgtataacctgtcttggtgttaaaacctgctttcagtaatgttctgagcccacattctttctataatctcaagatgataaataagcctctgtatccggttgggatgttgggctttattctgaaggctcatgtgtatacacattaaatatcattgtaagccttttcttctattaataaatctgcctcatgtcactaatttttcagcctatctttagggggccaacacccatggcccccacaatgtatacatataatttttctttcaaattcaagccatattaaatcctttctcagtcaaggtagggcatacacaaaacacaaaaatggagaaacaacctcaagccaacattacatactctttaagagatgaaaaactgttttcacagtcaataactaatattgtagcttgcttaactagctctgatacttgcaaagctagcccaggtcctaaaactctgtaaatatcctcctcggacttcctgattccaaggcactattggtcatctgtcatggtggtattctgtctaactacagtacatctaataaccttgcatttcttggtcaaaagtatttcttggatcattaaggaattaagagtttacatcaggaacagattttggcagaagtacagtgtaaaccctatattgagagatggacctccaagctacttcaggtttccaactcccagtgacagacaggttcccaacaatctgctccaaaaccctacaactgtgaaatcctgcacagtcagagccagtattccctgaatatattcattggattatattcaaaatgattatgcagagaaataaaggaattactatacatatgggagcaatgaatacaatctacaaaaaagttaaataggagggcatcttaaaatatttttaagctttttttattatactaataatatttgagaccatgagagtaatttatatagattaattaaatttaataaataaagcctaacaatattaagccaaggaagaaaattttttgtgagaaatattgttttgcataaaacaaaagtgttttgcactgagtttattttcaattttattttattttttgagacagagtctcaatttgttgcccaggttggagtgcagaggcacaaacatggttcattgcagccttgaccttctgggctcaagcaatcctcccacttcagccccccacatagctggaactacaggtgtacaccaccatgcccagctaatttttgtattttttgtagagacagagttttaccatgttgcctggcctggtctcaaactcctgagctcaagcaatctgcctaccttggcctcccaaagtgctgggattataggcactagccactgtgtctggcttatttttaattttaaattgaacttcaaaactcttctaagttttcctttcaaaaaccttgcttagctagaatttgacttactctaatttaacacaactggtaagagcctagtagaagaaaataacaccaaaaatatattaatttgtttaaacaatttaacatctgctaaccagttattagatatgtctttcttatgtatatcaatggttctaaatgtacttctccaagttatatgacccaaatgagtaagtttcatctaaaatccaagttgatgcctgactcaggccttatttgagtcctgccaaaacagatccatttctcgtacattttacagatgattttatgaagaaggaaaatgaggaataatgtctgccttttgtattcttctttgagcaaattttaatgtcttaccattctttaattaactaatgaaacctttgttgtgtctttatatttgtatgagaagcaatgattttacctttggttaaaaatgcttgagcaattttttcttgcatcaaacaaatttgaaataaacaaagaatcacagtgattataaacatgaagacccaatatacgagttactcataaacaatggatcaaatagcatcagtagtcactacatccaattattatttctgattttagtggaagaaaataaaattctgaagtttttaccaaatgaatataaatttttgatgaattttgttataaagatattttagtgaaaattttagacacaaagacatttgaaaagcactagaattgataccaaagaaccaagtcacaaacagtattacaatttctggaattttttgtgaaatgtgactttttatgaatttctgccaattgtattcttaggagtttgtctttctgtttgtataaccattgcttcatgtgaaagaaacttttgaaaattaaaattaataagtattctttaatcaattacaagtaaaactagactaatatggctgtgctatggaacatcaatacatggataaagttaattttgatgaagtcgttgacaaatattcataaagaggctaaaaaatggaaatacaatgctattattcatttctgtgtaaaactaaagaaaatgtctgaggggagccccaatcattttagaggtttattttgctaaggttgaggatgaacctggggaaaagaaacaaaatcacagaaatatctgtgatccatgctttttcctaagagggtttggagacacaatatttaaagcggaaagcgtgggcagtaggggaaaaaggaaagaacaaaaaggggagggtggataataaaggcaagcagttgcattcttttgaagctttgatcaatttcactgaatttacattttacctgtgaaaggagtgggtagtagaatagtcaactatgtgtttgtctggtgctcagtgaatcttcatttttatataggataaagtaaacatagaccagaggaagaagtcaaatacgcatttgcctcaggtgagtagagggatgacttctagttctatatttgtcctgtacctgtgaagataagctgttgatttatattctcagggtgaaattcagtacaacttcattttacagtaaggatcttggggcccgcaggagattttctgtgagaaaattgtaagagagggcccctgagaaggtatgtgccttctatctttgcagttatctatttaggaacaaaatgggaagcagttgtgtgtgacgcagttcccaagcttaacttttccctttggcatcgtgagttgggggtcctgagattttattttactttcacaactggaacagattttaaaaactttaaaaaacaaaaatatgtcagtgtccaaaaagtattaatgcattactttttcttatttttgtattgtttattttattttttaacatttttattgacatgaatatataggccattttcattatttgtttgatttcatgactattaccaaaaaaattttgtcatatagaggagggaagtattaaaaagggatctctgacatacacttggtatagggtcctggtaccaattgtgaaaagtaaaccctttcttataatccaaagtcacttggcaaagtttcttcatctcaggtgtccattttctactcacaaggtggttaaacaaaaaaagtatagaaattgggatctatcagcagacctgtccagtttctaacttggtaaactctaattaaattacagtgttaagctttacttttttttcaaaagaattagagaaaatgcaacttagaacaatgggcttcaaactagaatgtgcctatgtctgagtgttctcctgcacagagaattttaaggaaataaatgtttccatcctctttttacaatggttcttctcccatatatagaaaagtattaacttgtcacccatcacaaatcttaacacagaatgcatactggtgtgtaacaacctcagggctcctaacataggaatacaaattgtattttgcttcaggggaagactcctttaaaaattaatcaaagctcctaaaatcttgtcttggcttgtcatacacatatttgtagctagagtgaagttctgcgttagacacagggtatttggcccttgcttaagactgaattgacaaagtcttaagtagaataatgaaagttgttattttaaatgtaactagactatttgttaaggcttccacattttgggttatttgaatataatccacagataaaaatttaaatgatttctactggtgtattttagtcaataaagcagttaaaatttcatgaaaatatatgaaatgtttattcctattacagtaaatccttatcctattttatctcataaatataatgatatataatacttatgtttgtgataatataatttgatataaaatacaatatttttcacctcctaaaaataataaataaatatacttagggttatggctaaaaatgtagacatatgcaagttaaatacacagtttttcaaattttttatatagcacattaactaaaatatttgaagatcattggctctgagaactagaaaatagcttgagtacttttcctgatctgtcattaatttgctgagcaatgctgagtataatgtttaaagtgggaatccaaattatctttctgtaaaattatactttgggagctggagatacctttcatgcctgtaaactgatattgtcttaattttttgttccctaaggaagaataattttcttataattaagaattttcctgttctatcattatagcctctaaaatattaaatcttcttttgttggtctggatacttatatctaactgaactaggatatattatctttttttcaatgtcatctaacacaaaagctgtaatcattgatttgagatttgagctatgcaaaatggattaggtttccatacccaaaattataaaagtacttagatcataggctattaagtatttttagacttctttttctttttaatttagctgtttacagttacaactttccctataagcactgttttagctgcatctcaaaagtttggtatgttgtgtcttcattttcattcatctcaaagtattttctattttttttgtgatttcttctttgacttctttgttatttaggtgtgcattgtttaatatttacatatttgtgaatatcccaaattaattttgattattgacctctaattttattctattgtgattgataaacatatttgaataatttaaaatattttccacctactttaccttgtatatggccttgtatatggtccattctaagagaatgtgccatgtgcacatgagaagaatgcatattttgctattgttgagtagagtgttctaaggatgtttgcaaagtctagtaggtttataaagatgtttaagtcttctgtgtcttctatttccttgtttattctctgtcaagttgttctattgattactaaaagtggggtattgaaaaatctaactatataggttaacttatatctcctgatagattgatcatttattcaacataaaatgacaattttttatatcaggtaacatatattactttaaagtctatgttgtctgagattaggatatctactctagctttctgaaggttgacatacctttttccattcttttacttttaacccatttgcatcttcaaatctaaattgtgtctcctgcacacaacatatagctggatctttctaaaaaaatccattctgataacctttgcctttcaattggattgtctaatccattctaatttaatttcattagtaatatagttagatttgcatctgccgttttactttttgttttctctatgtcttatgccttttgtcctaagtataccttggcttgtggcaaaaccttatcaatttctgcttctatttcacatgaattttccctgctgtatctctgtgtgttctctcttctccttataagaacttcagtcattggatttagggctcatcctagtgcagtataacctcaacttatgtaattatatttgtaatgacccaattttaaaatatgatcattctgaggttccagtagacttgaatttgaggagatactatttaaatgtttcttttttaaaagaaaagtttgccttttaagataaatattttttcaccagttatggttggttttgaaggggatagagtttatggacttcctcactttgccattctggaagtaatatctacattttatttcagtcaaggataactgcaaccaatctctgtttttgttagaacacatgctacttaaaacagtatgaagcaatagtattgaaaatcattttttggggggaaaggattgatttgtttcgactgttaggacccttgatacatatcttgagttcttgaaatattgacaatcatacaaacgggctataacatctattatatattgaacacctgttctagaagtcccccaggaatgaaacacaatggagtacttattaccttatctaatgtaacaacaaatatgtgaagtagatgatattatctcattttataaatatgaaaattaacactaagaaggctgagtgacttccctaatagctaagtggtgagtcttaagaagccctcccttcctcagcaaaaatcctatgtatggtatttcatgcttcaccacaggcaattacaaagcattgtctggaagcctagtggtggaaagttgtcctcctcttagcagatttggtgtacagtcaatggactgcaggtttctggaatgagttgcagtcaaggactcaagacactggcagtagagcattgaatcaagtgtaacccttttctaagctcagggctctttgcagccgcactgatcacagacccgtggagctggccttgcctctactacattaagtagctcatcatatgtacaccagaacattttatatcgttatgtgtttgcaaagtagttccctcttccatttcttcttcatctccacttagaaagctgtaatcatcttttaatacccagatttccataacacccaagatggagactattaatctgttctgtgggatttcagagcccttgcacattgttttattttgttgtgcaattaccatattgcactatgattgttgatgtttctcttttctgctaattaatgaacttctaatatgcagggatcaagactttacatctggctgggcacagtggctcacatctataatttcagcactttgggaggctgaggcaggtggatcgcttcagcctaggagtttgagaatagtctgggcaatgtagtgaaacccccatctcttttacatctatttaatgataggatttgggatgttacctagaatatgattgtggaaggaaggaagaaaagatggaaaataagtgaaagaagaaattaatgaattctttgctcccttaaatttgtgcttttgagtgcaatttaagtgcaatttaattcagtggttttacatatgataagttccacatgagaaaactctttgtcagtcatccaagaaagattatactagcaaatttataggaactaattatttttaaaaaagtaatttttacctgttcaaattacaaaatgtcacagctgggaactccatcttttccacatattgaacctcaatggacgttgtggttggccatgtgaagtagttgagcaagcgaatgtagatctgccatgtcacaagtgagactgagcccagaaccaccaccaaccagagcaccctgcgaattttgctccggttctgaacaatattgtgtatcccatgaaaggaagtggagatggcaaagtcatggtcaaacttctttcgctcagtgggagatggcagtggtttctttgaaaggcaaagctttatcttttctaagagtccttaaggttttgcccataaaatgattaaacaaaaaaaagtaattaggaaaccttaatgctatccgtaaaaaaacacaactcacataatttaaagaggtgactctttttacttgtaattcatagaaactaaaaattcatcttttgttgcatgatttattcaggaatcaagaagtgtaagtgttggctacatgggtttattgagaagatgctaatgctattcatagaacggctattattaatgtaaatgtgttagtggtatggtattaataggtgacttccagctttaaaaccaagttggttacaacaattcataaactttaaatattaactcttatttttaaaatgctctttctctctgaaagtcctttagaagtcatgaacaaaatgaggctgattcctctgacagtcctaagtatggctaaaagtaatctgttcttaactaatgtttgtcctatggtggtataatttatggtaaatgtaactttcattctcgtattctttaatgtacaactattttatattttgttggttgtttagtcagaatgttcagtgttcagttgtagtattagttaagtaatctattttctacctcttcatggaattaattcatcatttcaagtctatcaggaatcaatcaataatatttattgatattcattggtaagaaccagggaaggtaacactaaatttttttggcaatatatgatatgttgacaattttattttggttaaatttctttccatttgttcataggagaagaggcaatgaatccctttgtggagggaaaggttcaatatagttaagagcatgagatgggcttcacaatggaagatcaggcttccggtccattcctcgcctcttataacctgcacaactttagccaagtttcttagtcttataccttttctgtcaaatggcagcaatggtatctgccttatgaatttgttgtattaaatttgttgataatacctggagagagcttagcacattatctagatcataataagtactcaagggtattagctatttttattattctgctaatgtagtggtgatgtggtaaatagtaaaatattcaggaattttaaaaagctttaaaagtatcttaaaaaattagttcttaatggctttatatatgttcataattaggtgaattaacttttatatcctttgccaaaataatacttttggaatataggtattcaactatccagcattaatttacttacaagatgtttcaagcttcatttactattaaatcattatttaatacaacataaataaccaatcaattagctaagctttttattcagttataggacatatgctataaaaaggtgtctattaacattttctaagggagtccatttcattcacttacaaattatattattattattttacaaattatattatgattattattcactaagcaggatagcttgtattaatatgattagcttgaagttggactaaaatcttagaatagcaccgttattaatgttgtttttagtataaaattaatgaacatgtatcaagtaactggcataatcccagagaaaaatcagaaacaagaaaaaagttattgttactaattagcaaaatatatttaaatatgctcttttgtgtattctttagtcatgacttgcaaacatatgcgaagaatttactctgataaaagaacaactcagtctctggataacttgtaccattcctagaatagggatcaaaactattagaaggggaagactaatgtagtaactagttactgacaagcaaagtgtggctagttgcaagcattaccccaaaacatttaactttcaagtttgcctgtcaaaaatcagcccatttaatatacatctaatccttgacaattggtttggcctttctggagtaataccaactattttctagtgttttaatagagttttttttattattgttttaggtaaatgtatgactgtcaggaagattaaaattggttgaataaatggcccactagtttgcaaagcagaaacttcttactctcctgactggagtatatacagtgtcattatgacaactagaccttgcattgagtgctgatcaacatagaagcattttgaggaacatcaaatcagctttgttacatttaaaaaataaaacctgcaggcccaggataaatagaaaccaaaagaaataaaacaaaacaaagaaacaaaatcagattctggcatatagtaatattttaaaactatttttgagtccctcatacaaataactttttttctaagtaaaactattcatttttaaaacttatattacttatattgtgttcaagtaacattggaaatcaaatttcccaaatgaagaaaaaaaatctctcttttcttacttctggcctctagaaatgaaaaatattactgctctgaggagttcactctttactcaccgttctcagcatatacttttgatttttctgtctgctccatttgtgatttcagttaagcaagagtcctcagggtaacccaattttcatcaataacagtattcattttgtgccctttatataaaatacagcagttgaggttgtaaaacatggaagcaatttaaatgtttgtgttgctatgttttgcctcataaagcacataatctgaaaaccaaaaatgttgacagaaccaggtatgggcatttatggactgatgagaagctaacccagagtgatttcatgagtgaaaagcaaaaagtatcattaggaaaccattttctcacagttaaagggacacttcctatcaaatatgtgtagttaagcagcagcccctgaccaggctagttgacactccaatgactcacccgggaacgtcttcttagcttttctttttacctttgtctttattcaacttcaaatcaaaacgcagctggaataaatttttttttatgggaaaggtgtcttcccttgtcggtgtttctttcttagtaacagaagctgtttctaacagaaataatagccaataaacatgacaaaataaaacaccaaaaaatatctgctcaagaataaatgattactgaaaacaaacaacttactaaaacataaagtctgattattttttatatgaacacttttggaaaattgttagaatttattatattgaataataaatggaagaatgtgcattattgtgcataaagggcatcatctcttgacagaattcagtgattgcatgtatctgtacctaatagagcttgttagactcaccattttataagcatctcaccattaatcatcagtatgattacgtatattttgcatatatttggaaacttgtaaactcagcactataagttcaaactagtcttatacggaggcaaactaattccaagtgatgtaagtaaggaatctggctagaggtcctcagttatcacagtaaagatttcaggaataggataaatttcatgatatatgaatttctccattaaagagctcttctttagggttaaattatgtattattctgttctcacactgctgataaagacatattcaagactgggtaatttagaaagaggtttaattgactcacagtttcacatagctgggaagaccacgcaatcatggtggaaggtgaaagaggagcaaagttacatctaacatggaggcaggcaagagagtttgtgtaggggaacttcccttcataaaactatcagatctcttgagactgtttcactctcatgagaacagcatgggaaagacccgcctccatgattcaattaactctcacagggtccctcccacagaacatgggaattatggaagctataattaaagatgagatttgggtggggacacagtcaaatcatttcattctgcccctagcccctgccaaatctcatgtcttcacattgttcaaagccaatcatgtcttcccaaaagtgccccaagtcttaacccatttcagcattaactcaaaattttgtagtccaaagacttacctgagacaaggcaagtcccttctgtctatgagtgtgtaaaatcaaaagcaagttagttacttcctagatacaacggagtacaggtattaggtaaatacactcatttccaaatgagagaaattggcacaaataaaagggctatggggcccatgcaagtctaaaatccaatagggcagtcattaagctttaaagttccaaaatgatctcctttgactccatgtctcacatccaggtcatgctgatgcaagaggtgggctcccatggccttgggcagctccaaaccctgtggctttgcagggtatagcccccctcctggatgctttcatgggttggcattgagtgtctggagcttttccaggtgcatggtgcaagctattgatggagctaacattctggggtctggagaacagtggccctcttctcacagccctcttctcactctttgtgggggctccaaccccacatttccctcctgcactgccctagcagaggttctccatgagggccctgcccctgtagcactcttctgcctgaacatccaggtgtttccatatatcatctgaaatctaggtgaaggttcccaaatctaaattcttgacttctgtgcacctacatgctcaacatcacatggaagctgccaaggctttgggcttgcaccctctgaagccatggcctgagttgtaccttggcccttttagccatggctggaacagctgggaaacaggacaccaagatcctaagctgctcatagcagggggaccctggtcctggcccacaaaaccatttttttctcctaggcctctgggcctgtgatgggaggggctgccataaaggtctctgacatgtcctgaagacattttccccactatcttgctgattaacaaataataaggggaaagcaagcttcttcttaaacttatttactcaaatttgttcctctcttctatgatatttaaaaacagtaaatgtatttgctctttctcacacaaatctggtaactcctcatctctcttttactttaaaattagcttttaaacacttttctccttctgtctttagctttgaaagtacttcattctcacttctaccttattactgattttggtaaatttaaattccatcttctctgttgagttaggaaatctccttccattttccttcatctcccctaattgaaatcaaagccagtatcctcttcacagttataccttgcttctcctttgtgacctcaagttccttaactttctaagatatctcattaaaaacaaatatggaagtgcccactttccttccttctacttcatctggtcattaaagttgttttgaatagcaaatgtgtttgacaaaggtagattttcattgagagggacttgtaaaaaaaaataagaaaaaaatttaaaaagatagatttcaaattttcttcctctctcccataccacccaaatacctacacacataaggtaggtaattacatgacaaaacaaaacccagtgaaaatctagagttctgaataattattatccaatacctctgaacaggtagcatcaacaataacaagaaaaaaaaactacctattagtgttaataaatgcaaaggatgaaattaaaaagcatgcatagaaaaacaatgcaaccaacttttatctgaccctgcatttgaaattagagcctaagcaacattaaaaacaatatgcagtgtctagaggagtatattctttctgacccattaccagttatatagacacataaatatgtgttagtcaaatatttcctgttaattctatttttaaaaagtcttatgtgttttaatacaaattttgattctgttaaattggcatatatctaaaggtataaaaaatctttgactaatactttttaatttagctttaaattaaaattttatattttattttctgttggtgatacatgaccattaataatgatataattaatctttttagatttagacaaacaagatagtgcctacaaggcctgcaaacaaagacaatctaaggaatgcttttttaaaaatctgaaatagatattttattcttaatctcagaaggaaaaaccaaagcaacctcacagcttagaatgtttttaaagtaataaatagttcagtggtgtcttgctttgggtctgtaataatacaaaagacagaactaatagggccatttctgttatggactatgcataagtgttgttggttagtgtttttattacaatatttttatagagctctaggtggaagaaattagccacggtatatctattcaaagcaaacaaattcatgcatctgaaataattccatgtagtgaggaaagagactacaaaatatcaaatccagtacttattatcattccccaccctcatctatttaacaatggaagctcagaaataaggagaaagaatggaagttctacaaaggaaggactttttgcctgttttgtttgtttagctatccaactgcaaagaaaaatgatgctcaatgagtgagtaagtccgtccctgggctgggcgtagtagctcacacttgtaatctgagcactttgggaggccaaagtggggagatcacgtgaggtgaggagttcgagaccagcctggaaaacatggggaaaccttatctctactaaaaatacaaaaattagctcagccttgtggtgcacacctgtaatcccagctactcaggaggctgaggcatgagaatcacttgaacccaggaggcagaggttacagtaagctggaatcagaccactgcactccagactaggtgacagagcaagattcagcctcaaaaaaaattttttcaaaaaaagaagtttgtcctttttattgcatattatgatgaaaattattgtaatttttcaaacattttattttaaaaagtacaaacttatggcaaagttacaaaaattgtacaaggaatacccacatatactttactttaattcaatgatttttaacattttcccacatttgctgtatcttcattattaaatgtatgaacttcccatctcttaagcaggatatcctcctgcataaatacaatatagtgatctcatttagaaaacttaacttttatacagcactttatgtaatatgcaattcatattcaaattttcaaaattcttcctcaaattaaatttatgatgtttaattttcctaatccagaacacaatcaagaatcacagctgacatttagtttgcatgtctattagtctcccttaatccagaaaatttccctagacattaattaatttttttatttttttgtcttatcattacattgctattttcaaagtatccatctcagaggctttgcaaaatgcctctcagttaagagttgttttcttcttcatgattaagttcaggtcaaatacctacaataggaataatgcataggtgatattgtatccttcacagtgcgtgtacatatcaggaagcatgtgatctcaggttctcctatatttggtgacagtaattttgatctcttgattaaggagatgtctgcaaaatttctactttgtaaatgtacctttttctttttgtaactaacaagtaatctgtagaggcagttattttaggttagagtattttgttcccgatctttcacacaatgttattagcataaatcaatgaatcctgtctgaaataattacttttatgatgtttcaagatgatgacttttcagtttctagcattctttctatatttatttgttggcactcatttgtataaaagaacgtcatcttctgatgttcctaatttttaaatgtttttaaatgtatttgtggactcatggattatttcaatattttatgcattataacctatgctgtggttactcatttaagaaattcttcagattggcaccttttctagaaagactaattaaaatgagtttactcattgtattagtctgttctcacactgctaataaagacatacctgatactaggtaatttataaaggaaagaggtttaattgatgcacagttccacatgcctggggaggcctcataatcatggcagaagatgaatgaggacaaagtaccatcttacatgagagcaggcaagaagacgtgtgcaggggaactctcctttataaaatcgtcaggtcttgtgagacttattcactgtcatgagaacagcatgggaaagacccacccccatgattcaattacctcccgtcaggttccacccattgttttagaaacaaaaaacaaaaaaccgggttcttgtcacaggaccagaaaacgttaagcacacagacactttgaagggtgagggggaatggaatttattggatgaaaaggaaaactaattctcaccaaagcaagatagagtcctgtttgcaggtctcccatctcacagattgaatcccaagttcccacccaggaacaggagaggccaggctcctccccactgcaaacaacatgcacttccaaggttccatcccatcctcccagtgcacaggtgggcactattcagaaagaatcagtcaggaaagggcaggcttcatcccggaccagcagtgtggttcttcagccttcaggctatcttaggcttgaaggcagggtttcactgggggacccttggctgcctcctgtctctatcatttccccctctaaagaagtatacctaactgctgttggaataaggataaggacaaagactcatctgaactgctttctgctgacagggggcactgcttggggaaaacggcagtcagagctccctcagaagcctatcaaagggtccctggcaaaaggggccctcatccaagtctccagttgcatgaacgtttggagtttgattgcctgaaggtgagaaataaaccaggttatagaaaacatgtatcaaaacaaaatgggggtggggttgaggacagctaaaaaattctgaggccttttaccagtttgcacagggagagggaggccaaaaacctaactggtaaaaaaaaaaaaaaaaacttttaccctttagccagcatgtcaggcttctgggttcccttcccctgagcccaatcctaagcaaactaggttaaagtttgagaaattaactctccccagtttggagaatgcatctgggtgaggtgtcccatagtacggaaacacaattacctatctgtgaagagaggacagaggagaaacacgaaaaaagaagggtcttttttttcaaaggggtcctagaaactcaggatgcatttgaaaggggtacagatggccgggtgcagtggctcatgcctgtaatctcagcactttgagaggtcgaggcaagcagatcacctaaggtcaggagtttgagaccagcctggccaacatggtgaaaccctgtctctactaaaaatacaaacattagccaagcatggtggtgcatgcctgtaatcccagctactcgagaggctgaggcaagagaattgctggaacccaggaggtggaggttgtagtgaggcaagatcacgctgctgcactctagcctgggcaacaagagtgaaactctgtctcaaaaaaaaaaaaaaaaaaaaaaagaaagaaaggtatacagactaatgatgaatggctactcatctacaaaaaggggagcagattcctccttccttgtatccccaagtcccagatactgtgacagggtgggtgtcaaagtggtcttcacttgtgttaacaggggggtctgggggtgagagtattcgcttttacccttgtataccctatctcccctgctgtccatagcctttggattctccagacctcatttatgccatggatactagtgtgacctttattcatgaaatgggaagcttggcttattcagcaggaatcagtcacactcatctgcattgtgccttttaacttgcattatcatctgcatctgggtccttcagatccagttccccctgcccccagggctttgatgtgaagcttagaattgagtttgggacaaaaatgtgtctcagaggctagcatggatttcttattataagccaaatgcttaggtgaggctgtggaattgagtcctcctccaacaaggaagagggcgtcttgtgacatgcccagataactggtggctatagttatctttgctaagatttgggtgcatggggcttggctttggttagctcccttggtcttactttcccaaaaaggaaacctccaggtgatgggcatcctatttattcccatcacctggcaggatttgcaggctaattgctcagaactagaatgttgatccaaaattttgacattacccatcccttttactccttctgagctttagttggagattactggttggttcacaggaacaagcagggttactctaaaatgtaggcaaaaacttaaaaacaactgatgagtctagaatttaataacaaatgtgtgataagttttgaaacataatttctctctctccaatcctcaattttgtttaaaaaaaatcatgatagggatgagttgtttgtaaaatagactttaatcttacacttgggctgagtgtttgcataaagtgcagaaggaataactatttctacataggccttttacattggttttgatggaaatctgttccacgaggaatctcagataagactttttaaagccaagcccagccatcagtttatatgctcaaatacctgtgagttgggtaatcgtctcctcttaaggtcccaagataaacttggagctcctgagcctgtaagaaagtgacattctttactaaccacaggtcagaaaccctgtagagggactgtgtagacaagggtatgaggccagttttctcaagaaactcttatcggctctgcaagttgagcttgactccttaaaaggaagcatacccttccagtcaacaccttggtaaaaaaactagtttatcaattgcaccctcttgcaaaagaaaatggattcttattgcactgatgcaaacatttatattgccataagttaagaatattcacaactagtttgcaaattctggagaagccaggcagagagacaaacatgctctgtattttgttgacaggagtataccttactcaattattaaaagtcataaatagttcaaaataagtttccttgactctgaaaaaaaaacaaggatcagcaatattccaagcaaaagtcaaaaagattgcctcagtttttttatgggtttgtgaatattttagctcttcatgagttctgtgtgttttccctttattccaaagttatcagaaacctgtatttgagagcacctgtcagagttctacagcttattataagccatcttttgaaaagaattaaaacaagaaaattgtctgtgaataacaaaatgtccaggttagttacagttagaaacacaattgacaaagaagcttggttatctctgtcatttacaattatttaacataaaaaccttaattatgatagcgtatactcagacattagaatttttaaaatcccatacaaatttgaaacacatattagtattatttaccaaaatataacctaaagaatattgaacaccattttggtaatctcatatacctaaatatgtcaaataatcctgttttcctctcttttggatactccaagggctctctgaagcatcaaaaagccaggcatcaggaaagaaaattttgaaactgaatttgattttcagaagcctgttaaatgtgttagcggtttaaaacacttgatattatgaaatagaactccagattaccttgttatttattttgccaaaatgatgaatcagaaatttaaaaaacaaaaaactttttataaccccttaaaaattttgctaaagagcagattagtgccttaagagaaccttgttttgcttttactttaatgctcaatttacaagaaaaccatataatatccttttgaatttagtcaatatgttcacatattgaatttttgcaagattaatttgtacaattcctttacaacttgtttggacttttagctttatcttatcaaattcaaaacaatcttttaaacctaagcaagaacttacatttccacaccttcttataatcttttactaaaaacacatcctactgttcttatacagcttgcatgtaaatctatttccagtagtttcaattacatgttataatggttactcctagcaatttttaactttaatgtaaaacttggtaagttgttttgattatgtgctaggtgcatccaaggtttgactaattccagcataattaagggcgtggttatttctatatgtccccaggccttaccaattgtggagcaggcaagacaaatagttctcaaaacccaaaaagcagtttatgaccttaaaacatttagcaaacctagcagttgacctgcataatttagtccacctatttatattttgatgacatctgcactttaccaataatcttttaggctgtttaaattttttgaagatgaaagtcatatgaactgaaaggtaccacagcttttattttaccctttaaaaaatatttgatccaagcacttatcttcttttaggccaattaattagaccttttttttaaatagacattacacacccaacacatatataactacacagacaggaagaagaaaacccagtagccatacgatttttcattttctgatcttctatttggattattggtccctttaagagggagggctaggaaaacaagcagcttttagagcctaataggcaggcattactgggaggcgaaaagagattttgagagggatctatccacttttaattcctggggttcaatgaggaagacagagatctctcccctctcttgtgtgcattaaaattggcaaagcagaatggagaaaaataatacagccaactgagaaaaagccgttttccagcaaagcaagatcccagaagagaaaaaaataaaataaaacaaaaaggccttttaaatatacctgtaacttagatattcatctttaatttagttgagcactccttaagaaaatccttttaaatctcctattacctgactttagccataccaagaagccagtatttcagcctttcaaactttactaaagcctcagagaaaggaaaatccaagatggttcatggaggagaagagaatcaacaaatagaaaagttacacagatatcaaacctgaaaggactcagttgctaagccatgactgaacctgggttgtgcagaggctaagcaaaacattgccatggagttacacgtcatgcccccaagtccataaaccaagatggaggcctgcagcaaagttcactgctgaccatacagaaagtcatgcaaaggcctggagttgtggctcatacctataatcccagcactttgggaggccaaggcaggtgaaccacctgaggtcgggagtttgcgaccagcctggccaacatggtgaaatccggtctctactaaaaatacaaaaattagctgggtgtggtggtgcatgcatgcctgtaatcacagctatttgagagggtaaggcaggatgatcacttgagagagagaagtggaagttgcactgagctgagatggtgccactgcactccagcctgggtgacagagtgacactccatctttaaaaaaaaaaaagaaaatcatgcaaagcataccagattggctacagcttaaaaccaacctcataaagaatttgtcacaattaaaactctacagaaaatataaacaatgatccccatcactcctggcctagcaaaacatcttccaaaaggaaaaaaaacaaaaaacaaaaacccttgcttaagtcaactgctgacccagtggagaaaaggaaaagacgtttaaatgcagggctgtgttacctgttgacagggtggagaaaagaaaagatacctgtggaagaacctcttattcttatgcaaatagtttcctccacaagggagatatatttaattgcagtcaatcagagtacaatttttggccgggggaggggaaggctccatggttgcatggcagggagcattgaccagcctgctgttgggcacccttgggccatgcagcccagccctggcagggaggggagcgaggaacccaccatttatttgcccatcctgtgtatgcctgcagccatcagggtggggtagtgcacaatttcctctcccctcagaagaggtctgaggagaaaaaggcttagaagcaaaaggaaaaaagatgtgttggtttgcacggtactcacccttcctcaagccgaatgttggccaccaaaaatgttgtagaaaaaaactgggttcttgtcacacaaccaggaaaagttaggcacacagacacgttaaaggttgaaggggaacaaaatttattttattaggcaaaaaggaaaactaactctcagcaaagcaggaaagagtcctgtgagcaggtttcccacctcacaaactgaatcccaggtccccacccaggaacaggagaagccaggctccaccccccacaaatgacatgcatttcctgaggctacgtcccattcttccagtgcacagctgggcattattcagagtcaatcaggaaagggcgggcttcatccagattggcagtctggtttttcagccttcaggctgttttagacttgaaggtagggtttcacaggggtggagggggctggggtaggtgggttatgaagggtagcggaacctttggctgcctcctgtctctatcatcatgacatttgggagctacaattcaagatgagatttgggtggggacacagccaaatcatattattctgcccctctcccctcctaaatctcatgtcctcacatttccaaatcaatcacaccttcccaacagtcccccaaagtcttaactcatttcaggattaactcaaaagtccacagtccaaagtctcagtctgagacaaggcaagttcctttcacctatgagcctgtaagatcaaaaacaaactagttacttcctagatacaataggggtacaggcattcagttaatacaactattccatgggagaaattggtcaaaatgaaggggctacaggccccatgcaagtccaaaatccagcaaggcagtcaaattgtaaagctccaaaatgatctcctttgactcatgtctcacagtcacgttgtactgatgcaagaggccggttcccatggtcttggggcacctctgcccctgtggctttgcaggggctgtccccttcctggctgcttttacaggctggcattgagtgtctgcagctttttcaggtacacagtgcaagctgtcagtggatctaccattcaggggtctggagaattttggccctcttctcacaactccactaggcaatactccagtggggactctgtgggagctggaacccctcatttcccttctgcactgccctagcagaggttctccatgaggactctgcccctgcagcacacctctgcctggatatccaggcatttccatacatcctctgaaatctaggcggaagttcccaaaactcaattctttttatttatttatttatttatttatttatttatttattattattatactttaagttttagggtacatgtgcacaatgtgcaggttagttacatatgtatacatgtgccatgctggtgcgctgcaccaactaactcgtcatctagcattaggtatatctcccaatgctatccctccccctccccccaccccacaacagtccccagagtgtgatgttccccttgctgtgtccatgtgttctcattgttcaactcccacctatgagtcagaatatgcagtgtttggttttttgttcttgcgatagtttactgagaatgatgatttccaatttcatccatgatttctgtgtacccaccggctcgtcctgagactgcacaaagcagcaaggccctgggcctggcccataaaaccatttattcctcctaggcctccctgcttgtgatgagaggggctgccatgaagatctctgacatgccatggagacatttttcccattgtcttggcaattaacatttgactcctcattacttatgcaaatttctacagctcacttgaatttctcctcagaaaatgagtttttcttttctatggcatcatcaggctgcaaattttctgaacttttatgctctgcttcccttttaaacataagttccaattccaaaccatattgttgtgcatacataaaactcaatacttttaatagtacccaagtaacctcttgaacacttttctccttagaaatatttcttgcaccagatgtcctaattcatcactctcaggttcaaagttccacagacctccagggcaggggcaaaatgccaccagtctctgctaaaacatagcaagagtcacctttgctctagtttccaacaagtttctcatgcccatctgagactacctcagcttggactttattgttcatatcactatcagcattttattcaacaattctctagaatgttccaaactttcccacatctccctgtcttcttctgagccttccaaactgttccaagctctgcctgttacccagttccaaagtcacttccatgtttttgggtatctttatcgcagctccccactctaccggtaccaatttactgtattagtctgttctcacgctgctaataatgacatacctgagactaggtaatttataaaggaaagaggtttaatggactcagttccacatggctggggatgtcttacaatcatggcagaaggcaaatgacaaagtcccatcttacatggcagcaggcaagaggacatgtgcaagggagctccccttaataaaaccatcagatctcgtgatacttattcactatcatgagaacagcaagggaaagacctgctcccatgattcagttacctgctactgggtccctcccccaacatgtggaaatcacaggagctacaattcaagatgagatttgggtagggaccaagcaaaaccatatcactcattttccacaattatctattaaaagtaaataatgtaaatatattttggaagaaaaaaacattgctaatttaataactcaaacttgtaatgctttaaaattgggtttcccaatttaaagcaccaacatgtttagctgtagaaaaggagatagagttcctgaccattatagctctcgataatttgagtggttatgaagagagacttaaggcaacatatagaaatactagcttctggatgctctttttaaataagaatttacttatgttatatttattttatacttttctatcatatatactaccagtcaaaatcctaaacttcttgggtcaaaacagaagtgaatcacatactgcttatttctttattccattttttgtacatgaccgtagctagcaagatgttgaacttgttcaattcttttgatttttactttcatgtactgattgcatgaaatgttcatccttagatctttaaatataggaagcaactctttttaaaaataatatgcacaggagtaatatacataagtaaatactacatgcctgtgatatcattatcaacaaacatttattaaatgtgccatggatatatcctaatcatttgtacttttttttttttttgagatggaatctcactctgttgcccaggctggagtgcagtggcaccatctccgctcactgcaacgtctgcctcctgggttcaggtgattctcctgcctcaacctcctgagtagctgggattataggcgtgtgacaccacaccgggctaatttttgtatttttagtagagatggggtttcaccatattggtcaggctggtcttgaactcctgacctcgtgatccacctgcctcggcctcccaaagtgctaggattgcaggcgtgagccaccgtgctcagcctcatttgtactttttaaaaagcccatacctagctggtatgttcagtcttttgaaaacaaaaggcttttgggaacctgttgatgagtttcttatttcagttctccagtttcttgggcagttactggttcagtttgtgggaggtttctgtttgtcactcagctgcagccacaccattagtgggacagcttcagtttaaaacaactccatggtttgccataaatattgaaagtattcctattattggtcaagagatggggaaggactccactaatgcttaacttgtaggcccattagcttgccaaattatgtgtccacacagtacatgatttcatgggtcaaggtgacttggacagggtttcttcaaatattctccctgcagttttaagtttcgttttctcaactctgatctcttatctctgtgtactagaacatcagggagacatttacctgactgtcaattatttagaacaaaaatattgatttctcatcatttccataactttgggcactattctagtagaaggttattagttgtgtggtaaatgcattttctaaaaaaatagatcaaaataaaacaaaaataactcaaagatagcaaaataaacaatagaacattgaaaaggcacaattcctgggtgataatataacataaatgattgtcaattttttctcatgtagattttacacactgtagtaaaatagtatttcccaaaattcatgtccatccagaactttaaattatgaccttgtttggaaataggatctttatagttatagttatttaaggataccaaggtcctgcaaagagtaaaacagtatttcccaaaatccatgtccatctagaatctcagaatgtgactttctttggaaataattttttgtttgtttgttttgttttgttttgagacagagtctcactctattgccaggctggagtgcagtggcatgatctcagctcactgcaacctctgcctcccgggttcaagcaattctcctgcctcagcctcctgagtagctgggactacagttgcatgccacaacacccagctaatttttgtatttttagtagacatggggtttcaccatgttggccaggatggtctcgatctcttgacctcgtgatctgcccacctcaacctcccaaagtggtgggattcaggcgtgagccactgtgcccggccaagatttttataaatataattatttaaggatctcaagatcctggacttaaggtggttcttaaatccgaataactggtgtcttcataaaagaccaaaaagagaagaatacttggacacagaaaagtgcagaaaggaaagctgtgtgaagatggaggtgaagcagaggtgaagttaatgctgccgcatgctcaggaatgctaaaagctaccagaagctggaaagggtaatgaacatagtgatcagctgtgtcaaatgttgctgatgggtcaagcacaatgaggcctgaatattgaccattgatttcagcaatgtggcagtgttagaaaagtggtagaagcaaataacaaaccactgtcttgaggagttttactactaagcaaaacaataaaatggtgccgacacggaaaatgtaaccaataaaagttttttcataaattagagacataataccatttttataaatttataaattcgtaagtataaatgccctaaaaagtaaatatgtgggaggaagaaggcctatttgtcagagcacaattcttgaggagttcgatgaatcatgatttaacacccaaatagagagtttgcaatagatagttcatttgtgatatgaacataggaattcagattatatgggaatacatactaggaggctatagatatcaaaatggtaatattcctctgattatttgaaatttcttagtgaaaaagatatcagagtaatcagctgaaagtagaaatagaggtttgagagagaggctaaggtgtgaaaattgataaaatcaatggtctagtaggccagccacagtggctcacacctgtaatcctaacagtttgggaggacaaggcaggtgggtcacttgaggccaggagtttgagatcagcctggccaacatggcaaaaccccacctttaataaaaatacaaaaattatccacatgtggtggcatgcacctgtagttgcagctactcaggatgctgaggcacaagaatcgcttgaacttgggaggcagagattgcagtgacccattattgtgccactgtactccagactgtgtgacagagagagatgtgatgctgtctcaaaactaacacaaaaacaaaaacaaaagaatgatctcaaaatgtatcgcgtgatgtcctagcaatgtggagagtccacttgacattcatggttatgattttaaactgaatctagtaaatttggttttgagtttttgtttatttttttttctccagccacattcagttgccagagagcaggcaccaaatcactggagagtgcaatttatccaggatagaattttggctctagaagtgtgaccaagtgagagagaacaagagaactgagagtaaatggcaaggagtgactgaaatcactaatcattaatcgccatgtgcaacaaggtgagagtggggcaagcacactcaaggggtgaaggacagagaaacgttagttagttcagtgcatcagagatcccagaaagattgctgaggtcaggatggtaaaacaagtaagctgtaaacagaaagatggtgggcagaaaacggtatgcagggagttaaaattataaagagtgacagttatttgttgtagaaaagtccaggatggagacatccagtagaaatatagttcgagacacatatataattttggattttcctgtaaaaatgtagaaagaaataagcaaaatttagttttttttttttttttttttgagacggagtcttactctatagcccaggctggggtacagtggtgtgatctcggctcactgcccaggctggggtgcagtggtacaatctcggctcactgcaacctccacctcccttgttcaagcgtttctcttgcctcagcctcccaagtagctgggactacagatgtgcaccaccatgcccggctaatttttgtatttttaatgaagttggagtgtcactatgttggccaggttgatctcacaatcgtgacgtcaggtgatccgcctgcctctgcctcccaaagtgctaggattacaggtgtgagccaccacgcctggccttaaaatttaattttaagaatagatttcatttgaccaaacaatcaatataagaattgttcaggagctattttccatctgttttagtgcttactgtttgaaatctggtgtatattttacactcacatctcgatttgaacctgccacatttcatgtgctcaatagccacctgtggctggtggctatggcaaaaattctgagaccagttctttccttgagaacttttaacttgatataacctctctcctaaagaaagcattaggtactttaaagaattcctaagtgaatgaggttgttttctgtctgcatttgtaaatatctagtcagataacgattgcaaaggacaactgaagtaaccaaatagttaataacaattctgggtgtttacaatacacaaagcaaacaccaacctttaccaggataaacatgtttctcaggcaggacaccaaggcaggtggctaaaaaaaaaatgaaatctattggtatacacatattgcagtgttgctgagaaattattatcgatgcatgaaatggatttaacaatcaatgagagaacaatgggtctttaccttctataaaataaaatctgtccctggttggtggcagcagctgaaggtttgcagggcatgtggttcttttgaactagcctttttagcctaagataagggaaagcttttgcttaaaataagctacaaggcccccaggtcagaacaataatttgaattaaaaaacaaacaaacaaaaacaagttaaaagctgccattaattttgagtttatttttatagactttcttctttgaacattttgtggttctcctacttatcattattatagttcatcaagttgataatattttgtcaagtagtttgaattaactttaagataatatactcttttaggagacaaagcaacttcatcagtggcaagcagcttaacagagtagagagaatgcacagtatttgaaatcagatgagatttgaattctggctctatcatttactgactgtgtaaccaagtatgcgtattttctaaaagatagattaatcattttttttctatctttattttcttttcttgtttccctggttccccacttcctactcagccctttagaaatgcaaatatagccttttaccccattcaccagacactttgtacagggcaagttcatataagtacgtgctgcaagagagagctctcctctagagttaacagttgatttacaaatgaaagcatgactgtggccgggcatagtggctcacgcctgtaatctcagcactttgggaggtggaggcaggcggatcatgaggtcaggagttcgagaccaggctgaccaacatggtgaaaccccatctctactaaaaatacaaaaattagccgggcatggtgatgcatgcctataatcccagttactcaggaggctgaggcaggagattcacttgaacccgggaggcagagcttgcggtgagctgagatggagccacgacactctagcctgggctgcagagcaagactccatctcaaaacaaacaaacaaacaaacaaaaaatagcatgactgtcacagaactctcacttaccaggagattgcctcaagaggtaacagtcaaaaagcgtgcctgctgctatctcctagctggggagtttctggcctattcccgcccatgaagaggccagcagtcaccagctcgactgcacagtaggcaaggcaccagagctagcacatggacccctctcttgctcgctttctcctcttcctttcaaagtgtctactttctgctccaaaagcaaagtagtatcctcaggtgggaaacctgtttttcttccccaaactaactttggaataaatcactttctttataccagaaatcggtcttgataatgggactctgcaagtggcaagtgcctaacctgtatttcagttacacctgtgtaaccgtgagaaatccctcaactcctccaacgtactttttccttctgtataatcaggacaatagggtctcataaagctgttgtaagaattaagtgagataagatgtaagcttgatacatgttagcaattattattttagattagcctgtgttgtctggaataactcatatatttttcttttaaaaggttgatgctaattataattacaagcctaaattcataaattttaggtataaagatgtcacattatttcaatcctcaagtcaggtcttgtctttagacaagtcagtctttaatttggcatttaccattattaagaaaaccttttacacaatcaagtcaatcatgttgtttcattcagtcagtcacaaaactgtagtgtttattgtgaaaagaaagtaaatccttgggaccccaaattcactaggccaaagggaaaagttaagcttggaaattgagtcacacaagaaattgcctttccttttgtttctaagctgatagctacagatagaaagccagatgtctgtacgagtaactgctctatgtttactttattttatgtaaagtgcagatttactgaacacaagagaatacataattaactgtttccctctaccctctacttatcacatgccacatgtggattcagtaatgttatacatgccctctttcccccattgcacacttttccctgttaaacattgaagccctcaaaatcctcttaggaaaaggcatggcttacagatagtcctgtagttttgtgttcctttttcctgggcatgttgaatgacattggcaaaatacacctttacattgattgagacctatctcagatacttttcagcttacactatcatgacaagacaagctattgtgctctctgggagatacaaaacatgcactctaaatgcagagacaaagcaaacacttgtcagatagtttaataaattctctgaaatcacagaagtttgatttcacggtgcactgatggtgctatgagaagacatcatgagaaggaaaggaatttaaccacatcttgaagacttaaggaaatccaagggaggatatccatgttattttataccacatgaaggcatcttatgaagctgggctttttacttgttgcagcaaagaagaccacacacaatgaactcaaattcccttttctgctaacttgaaagactcctacttctgttaccagaaaggggtcctgatccagaccccaagagagggttcttggaccttgtacaagaaagaatttggggtggctctgtaaagtgaaaacaagtttattaagaaagtaaagaaataaagaatggctacttcataggcagagcagtggcatgggctgctcagctgagtattcttatagttatttcttgattatatgctaaacaaggagtggattattcatgcattttctgggaaaagggtgaacctctcctttttagaccatttaggttaacttcctgatgttgccatggcatttgtaaactgtcacggtgctggtgggagtgtcttttagcatgctaatgcattatagttagcgtacaaggaggagtgaggatgaccggaagtcactttcaacgccatcttggatttggaggtttcaggctggctcctttactgcaaccagttttatcagtgaggtctttataacctgtatcttgtgcctcctatctcatcttgtgactaagaatgcctaacctattgagaatgcagcccagcagatctcagccttattttacttagtccctattcaagatgaggtcactctggttcaaatacctctgacatctccagtgaaaattctagtcgcactttttccatctgcctcctggatgaaaattacaatacccaatcaccagtcactatctgttgcatatcatcgtgcttcttcttgtattttattttattttattttattttaccaagtttgcacagtaaaggtcatttccagataagtcatcaagattctaatgtgagttaggcagtgtttcagatatctagcagaggacttctcaaattatgttctatataataccagttcattgataaatttctttgattttttaaacgtcacctaaatttgagagtcaccgtgcactttggcaactttaaaggttttaagaagctttgaaggatctatattggcttgtgtacagccagcctttgattacagaaactttcctttattacccctaataaatcaatggcagaaattctgtttcagaccacttactaaagtgctgagttaaaactgcagcatattaataaaacttcttagggaatttaggcacatcataattctcaatctgttgatgagaatagatattaaggcacaatctattgattgagaattatgatgtgcctaaatatcaattgagattagtgtccaactcactgacattctaggtagtcttatattagaatgaagggattttctctttcccagggctgcttgtgatattcctgaaaactagtttatttttattttagtgggactgtagattatctacttatgtaatttccttctttgtgttggctgccagaaaacttggggccaaatttggacccatgtctaacaactctcgtgattcttacagatcatgttgtaatcatctcattcatggcttaataatattttactacatgcatttttcttttgccccattctccctatcttcctgtttttagctgcattttttcatgtccattgaatgtatattttaaattttttaaagtttttttttcttttggagctaataataatattttaacaaactgtcttgtaagcattttgtttaatgaaagaagttttgaaacgtaagggaacgatcattgcactgttgaagtcatgagacttttaaatggctttgttccaatttcacctctaattagctgatgcactcaggcaatattttgaaattctctggacttccgtttcccatctgtgaagtgagtcagaaatagacagccttggttaaagattacagaccaagtcattttggcaggcgatttaatgcaacttctgccagctgtagaaaaagagtagaaagagatggggctagcttcagtcagacatgaggaagaaacagggctgggctaagatatgtgggcaattagagttagctaacaatttggttgccattcaaatacatattatcttacagatttgtttgtttggtagaagaagaaaaatttttatttaattagaattctttttaaaaacagacattcctagtatctgaagtgaaatgaatagatagaaaaaattcaaaaatggcatctatattattatttctggtttaaacatttttttctgaaaccagcataaaaaagggttgaaaaattacatgttgaaaataacttgttcccattaaatggaaatatttttgcgtgcttttgtttaagaattttagccaactgtgttgcacatgcttatgagaagaatgttctactgcagtaggtcagagctaatgaggagttttcctccatcctcccagccttgagagtgcttctatgttggcaaaagaaagctccattacatttcaccggtgatacaagaagatatgcatttgtttatatgcatgtcatcacctggtacttttctaacttctgttctaagcaaatgagaaaagaacacaggtgagtttcataggtatatgactgttcacatcaagcaaatgctggatgttatcactatgtgctattggaacagatgttttaggattgtatgaatagacaaagagctcaagaaattgaggcatcacacggctccgtcattgtagaccagcaagactcggaaaacctgtgttaaaacacttgtaaatagtcacactgtggcagatacctcagtttcaacagaacattaaattagatttgtaaatttaaacatgtttaacatattattttattttgtatgtttttataaatttgtcttggaattaaaattctgtaaaaggtacatgcatctttatatctgatcttacgttcacccagatctgtgcctggctgattcctcaccatttggtttccattggtgtctccctctcagaggagtttgccttcaccttccttctctgctattccctgttccatgaccctgctttattttttttcatagccctaattgtgatataaaatcattttatattgggggagccagcccccaatatttcaacgtaggttattttctattttccttaagtgtcggtcggtctgagaaataaagagaaggagtacaaaagaaagaaattttacagctgggcctcgagggtgacatcacctattggtaggttccatgatgcccctgagctgcaaaaccagcaagtttttattagggatttcaaaaggggaagggggtacgaacagggcataagtctcaaagatcacatgcttcaaagggcaataaaagatcacaagggaagacaggaagagcaagatcacaaggccagggcgaaattagaattactgacgaggttccatgtcctgctgggcacatattgtcttaataaacatcttaacaggaaacaggattcaagagcagacaaccagtctgactagaattcaccagactggaatttcctaatcctagcaagcctgagggcactgcaggagaccagggcatatttcatcccttatcttcaaccgcataaggcaaacactcccagagcagctgtccatagacctattcctgggaatgcattccttctccagggttattccttgctaggaaaagaattcaatgatatttctcctatttgctttctacaagaagaaaaatatgactctgttctgcccggccctgtaggcagtcagatcttatggttatctcccttgtcccctgaaaatcgctgttatcctattctttttgagggtgcccagatttcatattgttcaaacacacatgctttacaaacaatttgtacagttaatgcaatcatcgcacggtcctgaggcgacatacatcctcagcttatgaagatgatgggattaagagattaaagtaaagacaggcataggaaattataagagtattgattggggaagtgataaatgtccatgaaatcttcataatttatgttcagagataaatgtaagaaacgtgagagacaggcgtaagaaattgcaaaagtattaatttggggaactattaaatgtccatgaaatcttcatgatttctgttcttctgctgcggcttcaacagtccttccattcagggtccctgacttcctgcaacaatcttattttctaattttgttcaaatttctttttgttttctttcttttttgaattattatacttcatgttctgggatacatgtgcagaacgtgcacatttattacacaggtatacacgtgctatggtggtttgcttcacctatcaacctgtcagctacatcaggtatttctcctaatgctatctctcctctagtcccaaaccacatgacaggccccagtgtgtgatgtttccctacctgtgtccatgtgttctcattgttcaactcccacttatgagtgagaatatgtggtgtctggttatctgttcctgtgttagtttgctgaaaatgatggtttccagcttcatccatgtcccagcaaaggacatgaattaatctctttttatggctgcatagtattccatgatgtatatgtgccacattttctttatcccttaggggcagattgacacctctcatggccaggtacctctctgagacaaagcttccagaggaacaactgggcagcaacatttgctgttcagcaatattcgctgttctgcagcctccgctgctgatatccaggcaaacagggtctggagtggacctccagcaaactccaacagacctgcagctgagggtcctgactgtcagaaggaaaactaacaaacagaaaggacatccacaccaagataagaactacatgatgaatgcacaagcttcagtagccaattcaatcaactagaagaaagggtatcaatgattgaagatcaaatgaatgaaatgaagtgagaagagaagtttagagaaaaaagaataaaaagaaatgaacaaagcctccaagaaatatgggattatgtgagaagaccaaatctacatctgattggtgtacctgaaagtgacagggagattggaaccaacttcaaaaacactctgcaggatattaaccaggagaacttcctaaacctagcaaggcaggccaacattcaaattcaggaaatacagagaacaacataaagatactcctcaagaagagcaactctaagacacataattgtcagatttgccaaatttgaaatgaaggaaaaaatgttaagggcggccagagagaaaggtcgggttacccacaaagggaagccagtcaggctaacagtggatctctcggcagaaactctacaagccagaagagagtgggggccaatattcaacattcttaaagaaaagagttttcaacctagaatttcatatccaaccaaactaagcttcataagtgaaggagaaataaaatcctttacagacaagcaaatgctgagagattttgtcaacaccaggcctgccctaaaagagctcctgaaggaagcactaaacatggaaaggaacaaccagtaccagtcactgcaaaaacatgccaaattgtaaagaccttcgaggctagaaagaaactccatcaactaacgagcaaaataaccagctaacatcataatgacaggatcaaattcacacataacaatattaacgttaaatgtaaatgggccaaatgctccaattaaaagacagactggcaaactggataacgagtcaagactcatcagtgtgctgtattcaggagacccatctcatgtacagagacacacatagtctcaaaataaagggatggaggaagatctaccaagcaaatggaaaacaaaaaaaggcaggggttgcagttctagtctctgataaaacagactttaaaccaacaaagatcaaaagagacaaagaaggccattacataatggtaaagggatcaattcaacaggaagagctaactatcctaaatatatatgcacccaatacaggagcacccagattcataaaacaagtccttagaaacctagaaagagacttagactcccacacaataattatgggagactttaacaccccactgtcaacattagacagatcaatgagacagaaagttaacaaggatatccaggaattgaactcagctctgcaccaagcagacctaatagacatctacagaactctccaccccaaatcaacagaatatacattcttctcagcaccacactacacttattccaaaattgaccacatagttggaagtaaaacattcctcagcaaatgaaaaagaacagaaattataacaaactgtctctcagaccacagtgcaatcaaactagaactcaggattaagaaactcactcaaaaccgctcaagcacatggaaagtgaataacctgctcctgaacgactactaggtacataacgaaatgaaggcagaaataaagatgttccttgaaaccaatgagaacaaagacactacataccagagtctctggggcacatttaaagcagtgtgtagagggaattttatagcactaaatgcccacaagagaaagcaggaaagatctaaaattgacaccctaacatcacaattaaaagaactagagaagcaagagcaaacacattcaaaagctagcagaaggcaagaaataactaagatcagagcagaactgaaggagatagagacacaaaaaacccttcaaaaaatcaatgaatccaggagctgattttttaaatagatcaacaaaattgatagaccactaggaagactaataaagaagaaaagagagaagaatcaaatagatgcaataaaaaattataaaggggatatcaccaccaatcccacagaaaaagaaactaccatcagagaatactacaaacacctctatgcaaataaactagaaaatctagaagaaatggataaattccttgacacatacaccctcccaagactaaaccaggaagaagttgaatccctgaatagaccaataacatgctctgaaattgaggcaataattaatagcctactgaccaaaaaaagtccaggaccagatggattcacagccgaattcgaccataggtacaaggaggagctggtaccattccttctgaaactattccaatcaatacaaaaagagggaatcctccctaactcattttatgaggccagcatcatcctgataccaaagctgggcagagacacaaccaaaaaagagaattttagaccaatatccttgatgaacattgatgcaaaaatcctcaataaaatactggcaaaacgaatccagcagcacatcaaaaagcttatccaccatgattaagtgggcttcatctctgggatgcaaggctggttcaatatacgcaaatcaataaatgtaatccagcatataaacagaaccaaagacaaaaaccacatgattatctcaacagatgcagaaaaagcctttgacaaaattcaacaacccttcatgctaaaaactttcaataaattaggtattcatgggacgtatttcaaaataataagagctatctatgacaaacccacagccaatgtcatactgaatgagcaaaaactggaagcatgccctttgaaaactggcacaagacagggatgctctctctcaccactcctattcaacatagtgttggaagttctggccagggcaatcaggcaggagaaggaaataaaggttattcacttaggaaaaggggaagttaaatcgtccctgtttgcagatgacatgattgtatatttagaaaaccccattgtctcagcccaaaatctccttaagctgataagcaacttcagcaaagtctcagcatacaaaatcaatgtgcaaaaaatcacaagcactcatctacaccaataacagacaaagagagagccaaatcttgagtgaactcccattcacaattgcttcaaacagaataaaatacctagaaatccaacttacaagggatgtgaaggacctcttcaaggagaactacaaacaactgctcagtgaaataaaagaggacataaacaaatggaagaatattccatgctcatggacaggaagactcaatatcgtgaaaatggccatactggccaaggtaatttatagattcaatgccatccccatcaagctaccaatgactttcttcacagaattggaaaaaactacttcaaagttcatatggaaccaaaaaagagcccgcattgccaagtcaatcctaagccaaaagaacaaagctggaggcatcacgctacctgacttcaaactatactacaaggctacagtaaccaaaacagcatagtactggtaccaaaacagagatatagatcaatggaacagaacagagccctcagaaataatgccacttatctacaactatctgatctttgacaaacctgacaaaaacaagaaatggggaaactattccctatttcataaatggtgctgggaaaactggctagccatatgtagaaagctgaaactggatcccttcctcacactgtatacaaaaattaattcaagatggatcaaagacttaaatgttagacctaaaaccataaaaaccctagaagaaaacctaggcaataccattcaggacataggcatgggcaaggacttcatgtctaaaacaccaaaagcaatggcaacagaagccaaaattgtcaaatgggatctaattaaactaaagagcttctgcacagcaaaagaaactaccatcagagtgaacagacaacctacagaatgggagaaaatttttgcaatctactcatgtgtcaaagggctaatacccagaatctacaaagaactcaaacaaatttataagaaaaaaacaaacaaacccatcaaaagtgggcaaagtagatgaacagacacttctcaaaagaagtcatttatacagccaacagacacatgaaaaaatgctcatcatcactggccatcagagaaatgcaaatcaaaatcacaatgagatgccatctcacaccagttagaatggcgatcattaaaaagtcaggaaacaacaggtgctggagaggatgtggagaaataggaacacttttacactgttggtgggactgcaaactagttcaaccattgtggaagacggtgtggcgattcctcaaggatctagaactagaaataccatttgacccagcaatcccattactgggtatatacccaaaggattataaatcatgctactataaagacacatgcacacatatgtttattgcagcactattcacaatagcaaagacttggaaccaacttaaatgtccatcaatgatatactgtattaagaaaatgtggcacatatacaccatggaatactatgcagccataaaaaatgatgagttcatgtcctttgtagggacatggatgaagctggaaaccatcattctcaacaaatgatcacaaggacaaaaaaccaaacactgcatgttctcactcataggtggtaattgaacaatgagaccacttggacacaagaagaggaacatcacacacaggagcctgtcatggggtggggggagtggggagggatagcattaggagatatacctaatgtaaatgacgagttaatgggtgcagcacaccaacatggcacatgtatacatatgtaacaaacctgcatggtgtgcacatgtaccctagaacttaaagtaaaataataaaaaaaagaacaaagtcttgttgaaccaccaaggaggaagaaattttcctttttgaggatatcatggaaagcatcccagaagaagtctatttgaaatgtttcttttttttttttttttttgagacggagtctcgctctgtcgcccaggccggactgcggactgcagtggcgcaatctcggctcactgcaagctccgcttcccaggttcacgccattctcctgcctcagcctcccgagtagctgggactacaggcgcccgccactgcgcccggctaattttttgtatttttagtagagacggggtttcaccttgttagccaggatggtctcgatctcctgacctcatgatccacccgcctcggcctcccaaagtgctgggattacaggcgtgagccactgcgcccggcctgaaatgtttcttaaagaatgagtgagagttcaagaggtggagaggtggagaggtcactgtaagcatggaaaatttaaagatttcaggacttagttcctatgctctagatttatcactaggtgtttgtgtgggaagtcatgggaaatgagatctgaaaattatacagtctgctgtaaatgtgtgaactcttgagttttctgctaataagtttgggtagtatgcagattttgttgatcatttaaagaaatcaatgtaacatgctagcatcagaatctgcttcccccttctatcgggggaacccacccccaatatttcaacgtaggttctgtctattttccataagtgtcggccagctgagaaataaagagagacagtataaagagaggaattttacaactgggcagctgggggtggcatcacatatcagtaggaccatgatgcccacctgaggctcaaaaccagcaagtttttattaaaggttttaaatggggagggggtataagaacagggagtaggtacaaagatcacatgcttcaaagggcaaaaggcagaactactactaagggtctaacaaagatcacatgcttctgagggaacaggacaaagggcaaaagcagaactactggtaagggtccaacaaagatcacaaggcaaagggaaaaagcagaactactgataaagtctatgttcagtggtgcacatattgtcttgataaacatcttaaacaacagaaagcagggttcaagagcacagaaccagtctgaccacaaatttaccagggcggagttttccccactctagtaagcctgagggtactggagaccagggtgtatctcagtccttatctcaaccacataagacagacattcccagaacagctgtttatagatctccccccacgaatgcattcctttcccagggtattaatactaatattaatattccttgctaggaaaataatttagtgatatcttccctacttgcatgtccctttatgggctctctgcaagaagaaaaatgtggctctttttgcctgaccccacaggtagtcagaccttatggttgtcttcccttgttccctaaaaattgctgttattctgttgtttttcaaggtgcactgatttcatattgttcaaacacacgttttacaatcaatttgtacagttaacacaattatcacagaggtcctgaggtgacgtatctcctcagcttaggaagataacaggataaaagattaaagtaaagacaggtgtaagaaattataaaagtattatttgggaactgataaatgtccttattaaaatgaaatcttcacaatttatgttcctctgctgcagctccagctggtccctccatttgggttccctgacttcccgcaacacccttcccttttaaagaacagatgtttctattttgcaattttttctgacttgtgaactacctttaatagtatttttagtatttagtatttactttaatagtaataatatgaattctataaaattattgctatttaaccattccaacctacaaaagcatcaatttcatatggttcaaactgtatattatgagaataatacctaaactttaaataatttttttataatacctaaacttttaaaatcattttaatgttttttatgtagttgataataaaatatgctacttagtacttttaaaaaattatataatacattatgattgtattataaagtttatttaatataatttatactattaaaatagttggtaacctcttcttatttacaaatagaacacttgcttttaaaaatactattaaattatataaagaaaagcatttcttttcaaattttcaatgataatatatcatgttgaactaggaaaaaatgaatgttaacgtgtttatataccaaaatatggccaaaaaatagttttcataacctcatgtctgaaattgctggaacttatttagaatctcattggaattatttttattaaaatgttaatgatttttaataaataaagaaataaaatttatctgtaggcatttctccaaagcccaggatgagaaagggtctcctggttcctggttcctttgtgatgtgttccatgtgagaggcaggccagtttccttaactgtaagagtgtttagtgtaaccttatctacatacatcttccaagaatgtcatttatttttcccttgaaaaccagtcatcctaaatccacagagataaatgaagtagtcctttcactggtccataatttcttcccttgaaattggtgccctaagtttgttttctgctttttctcaagcctgccataattacaactgagcaaacgttagttgttgatggctgtttctgagttttatcaaagagactttgaaaacctcctaagtgtgtgactaaatttaaatcctagctaaggaattttaattccgttcagactcccatctatgggaatcaaagaaaacgttagaacaacaaaacaaggacaagaaaaaagctacttcacagcccaaatggcaatttatcttgtcaactaaagtttattgaatggctgctatgtttacagatgcttcttggcttagaaaggaaaaaatctgttaaaaaaagtaattattcaattcctaaatatattatagctcctgatgaacaagagctgtatgtattagattggcttctgcataagaaagtctgagcccgagataaggatttgggggatggggatttatctgggagatgttcccagaaagtagtgagggactaaggaagttgagacaggaaaagagccataaataaattattgaggtcaatgtcaggagcaactgtgggttgctctgggctatttgaagaagggtgcagaatcctttcagaattcccctactgagtcagcatttctgtgtctgccacaatctaccactgttgagtaaggaaaagagtgggaaattgcattggcagacaggaagatgttgcagcagttttaagctgtgaagggtagatggaaaaagaaaagttaacatcttatggaagagcacatgtggtgctttgtagaaagaaatattgtgatggctgaagggatgatctttataaactcctattcacgttcagagtttagctcaatgcaagttcctgctaattctcattgctctaccctcgcaggctcactcttttctgcaccctaaccttagaaatcaagaggaaagacctagagacaaagatttttgttataatgctttatatctgattttcatattcttttactacatgtctgaaaaagaaagttgctatatctcttagctttctagtatttttacttctgaatatagattagatggtttctagggtaacttttaggcccagaattagttacgatttgcatcttcttaaacatgctcatctaccagtgttgcctccagcatcttccttctctaagccatgtgtgcacagaattatgtgcatatggaaatagagtgggtttagaaggttactgcagatcattgcctgtacccgtagaatctcctctcttgatctgttaaatgtctgaggttctattacattgtattatttgagttaaagtatatttccagaaagtctgtgtaaaatattcaatatataaataaatagggagctgtagatactatagtcatagaaattctaaatctgagcctaggagcagtggctcatgcctgtaattccagcattttgggaggctgggatgggtggattgcttgaggccagaagttcaagaccagcctggtcaacatagtgaaaccccatctctaaaaataaaaataaaaataaaaataaaaataagaaataaattctaaatgtgattataaataaaagtttcctaattagattatcatcagatggacaaattgggttcgaagtggcaaaatttaagtattggcaaatgatgaccagaatataactagtaatacatttgataatgctattgcaaaaaataatgaggatgtgtgtgtatgggggccttccactgtagttactctcctggatgaagaaaataagttatttttagattagcttgcagtttctctgatgccccaaagtcaagtctttcaatgatcagttcttgtgatgtaaaagcaaatattgaattgatactactacttaagagtgaaatgtcatttctttaaaaaattttttgtttctaaaatatctattttttccaattcataggaaaatttgtttccttatttgttttactagtatgttgaccaataagtgaaggaaacttctcagctcaaaaggcttaaagagagtggaataaattatttagcattattctctgtaaacacgtacccagttgaacaactatgtagagaaagaggggctgttaactgttctctgcttccaaacactctaagccaggacaccaggaaaagcaacagtgactccaccgctctctcaggtaaggtccctatccagtgtgtaggcaatttccaggatcattcataaaaactcaagggaaatgtgacaggtatagcatatagttttgatgattttcaagttcaattataacatggcatttgcatgttgtttatctttctgtactagatatataatttattattcagtaataaaatcaagattttaacctgggtcaggatcttgaagattataatcagcttaaacactttctattttggtgaggaaattgatatgtacagaaattcagtcagtttttctcatattacaaggtagtcgtagagccaagactagaaatcaggtttctgacttccaatgactttggctaattagacaaaattccatcatggtagatgattaaataaaggctaagtgctgtttctgcctatagttcttagtgagtagcagtggcatgctaaggataaggccatgaagcttctatcctggcttaattgttcttggggcaattgtttagagcttagattaataaatgatgtttcaaggaagaatatttttatcactgacactgtatagaattatgggcacatggctattattggttcttgttgttgttgttgttgttgttttgtttttgttttgagacaaagtctcactctgttgcccaagctggagtgccatggcacaatcttggctcactgcaacctccacctcctgggttcaagcgagtctcctgcctcagcctccctagtagctgggactacaggcacgcaccaccttgcctggctaatttttttgtagttttagtagagatagagtttcgctacgttggccaggctggtcttgaactactgttttaaaattctatataggcaatgtatgctaatgtggatgactgctagctaccctgtcattggtatgccacagatgaatagtaaactgataatgttcatttaaattccaatacaatgtgttgagagcttaactgctgctgattattacatgatatttaggtcagaagaactctgatgattgaatggaagtgggctttgagcatgtacccagactttattatacagttaatttccctagaggtgttaaatttcagtttttggtctagaagctgtaagaatattcaaatttgagagaatacatatttgttttttacaagctcatcatcttatgtatcctaatactatgccaaatgttttcttgggattgaataaatgtaatttttttaacttggcctctgttgattcattggatgtttgttactttgaatataaaagcagaacttggcaagtcatacaactcaatttggcagatcactcactcttagcaaatgaactgtgcccaacataaatccactctaaagtttacagaggttcagttctgtaccaatggaaatgagaagttagctaagagtacaagaagcatgctgattggctgatgcagggtaagcaggctacataaaaggcagctgtagaacatctgggaaggtcaatgatagcatctgcctagagtcaaacctccgtgcttctcagacagtgccttttcaccatgagtgggtgcccatttttaggaaacaactttgggtgagtatttacctttattctaagtgggttttggcttttagaagtatcaggtgtgagcattttaatttctgaatttaaggagcattgaaaactgtcacctttattcctttgtctaacaatctactctaaagaaaatttgcaatgagaattttaatcacccatatcattagttaactgtgttttctaaagcactatttttccctcttgatttattaaatttgcagatatacttttaaaaaactccccgtagaaggcagcgaagaagacaaatcacaaactggtgtgaatagagccagcaaaggaggtcttatctatgggaactacctgcatgtaagtggcagggtccttacagggtttggtgtccattgttaggcactcaattctgccaagtgactttttatgattttatttcttggaattagggaaagtcaccaatcgttttctggacctaaggatatttttattcataaacacttttacgttttcaacttttgttagaataattcaagagacttataggataaaattcatatctccagtggaagtaagagcagagaatccagaatctgggaggcgtatacatgataagatacactgtggataattcacaggcattgtgcaacttgtatagataagacatggttaataaatgtcagcctagataactgcaaatgtatcttgaaaaagttctcctttaaatctcttatcatgaagtcgaaatgtaaaaggcacacagagaattttcttaaaatcattaacatataaagagggatgttaatgaatgaggtattgggagattattctgggccaagtttcagcctgtttgtcttctattttttttaagaggcaaaatgattagtccttgatgtcttcatcggtgagtttctaaggattaactgataaagaatgttaaaatattcttagaataggctctttaggggaataaaagaatgccaaatgcatagtcagctcagcaagttttcaagttttcatcatattcatttcatgaaaagggatatgatgtctcaaagagcttaataggatttattatgataaaatcctaccaaatagaaattttctgagaagaataaaaatcacaaattcaattcactctttatgatgagattcgtccattgtttaaaagaaactagattggtttctgagaattttgagtttggaggagcatttgtcattatcatattctacttcttactaaagttcataaaaaccaagttctgcaatttcagacaggctttttatttttcatttcaagttggaaaaagttttgaatgcacaagaactgcaaagtgaaacaaaaggaaataaaatccatgatgaacatctttttatcataactcatcaaggtaagttgcacaaaggttttggacaatattccacaggcatttctcattgataacgaggaaagctacaatttttaaactacaaaatgatgaaagatcatggaatcacctctgttagaaatgtttgagaatattttgctgccagatgaattctcataggactgatataaggatttcaatagtcttctttatgttactcctctgctaataggtgaagtaggactttagctttgttcttaactccaaggggactttctgcctcttggaatttcactaggaattcacaagtgaagatgttacgtttctcacttcggaacactaaaaaactattttcaagatcattgaaatttatgctggattgacataatcctatacaaatctagtaataaagacaaatgtaaattgtgtccaaaaatgtatgtttatcctttccagatttctataatgatttctgggcagtgggtttttttttagcctatgtgttcatgacttcagaagtttagaaggtccctgaactccaaaattatgcacaaattttcatgaatattatcttaaagaggtctgtgaccccaaaatattagtaacatttactttaagcttttcagtaccactatactgacctcttaatgactggagcccaatcactgttgcctgccagtgccccacatctagatgtgtttccctgccttaccaattctttgtgttctttcctcaaatggatgctttccaatgtgattgagtaaattaataaactctggtaaagaaattaaaagttaaaaaactggcttaatgtgtcagttctcctgtttttatgtttatacttttatgggtggcttataccgaggcaatatcaataggagaagaatcatggtatggtagcataaattaggaatttaaaaattgtttagtatctcagttctactgttataaattgtgtgactctggtcaagttgcttagatctcaggacctccatttccccatacgtaaaatggagagaattactgatgctctcacttacagagttcctaggaagataaataagataatgtgcatcaagcatttagcccgaggtatagcacataataaacatgcaacaaatggtagctatcattattttataaaaacacttttcttctattctttagttataacatgtaggcagtggttacatagggttaaaaaagatatacataaactgatcaataaatgtttgattgttctttgctcaaatataaaaattaggtcccccaaagtctttttaaacataacttagagttataattggattctcttaattagtatggaaacattgcctttatccatatgattgaaccaaataggatgcactgaagatctctaagattattgacttcctgtgtcatctaattattacattgtctatttaatttattcataaaaataaaaataatcacccaatatttactttatgcctgacactgtgctaggtaatgaagaaaaatggatgagtatgagtaagtccttagtttctagtgacaaagaatactatgggaaggacaaatcaacggggagaaccatttatatttgctatgaatcatctagcaacacaaaggagtcaaaatgtctatccatgtctaccatactgctgtaagtcttaaggttttgaatcataggtttccaattgtaggtgggtaactgatcattttgcaaatgaatcaactgaagttaaagaaaatggttttgccccaattgacacagcccgtcacttcagatagattgattccaactatgcttcttccaacatgtcattactgtatcacttttctttaatgccaatgttactgtttgacagcccgtagtaaaaggggagaacaaacttaatccttcgacagaaaagctttggcagtattcaggtttgaacaaataaaccttggactcatggaaattctgaaagatgatctactggataatgtgaactcaattgccacaaagttcccccgggaattagctgttacagtaatatgaagctttgccattttcctttgaccacaaacatctggccgctttcccatatgtgctaagtctatgagttgctaggattttcacaaataaaacaaacagacaaaatgctgcattttaagtaacttagctttgtattttcaagttcttaaaatcctacagtctttcatttaggttaggaaatattaatttctcagtgtgtagatgaagttgattatcacttctgcttccccacatacttccagcttccatagaggaagctagaattaggttatgtgctatatcctcaaagacctaaaaatgcatttgttgagaggaattagtgtaataataatgaatatgaagcattaggtaacatgtctagcatattaaaacatttaataaaaggaggctattacaactttaacactaacatttatttctggcacacaatgggactatatttacatttattgattttaaggtaacattttaatttctctttcaacatgttaaacatatctttcatataataatggccaaaaaggctcccataactttccaactgacaatgatttccttattacagcttatgaactctggtttaagcaaatcctctgggagttggattctgttcgagagatctttcagaatggccatgtaagttcttatgtcacaatattggtttcatgtatatttttggaagatatggaaagtattattaatgagagaaaaacattaacaccaaatggtggtcttaacttttaatgatagaacaaacagacattttatgaatgaatgaggagttcagtcatatttttccattgctattttgaaattacatgtgactttaaggttcctttcaaatttcagtttcaagtcccttgtttagaactcatttccacccacaaagatgttataaatgatggtggattaccaagctaatggggatcctttaattaacaggtaccagaattgtatttctactgaatattagctgcaggaagatgggagcaataataaagaaagtgaaaaaggaagagaaggaggcagtagagaaagagtggtgggaggaagaaaaagaggaagaaaagggggaaaaggggaatggggcaatggggaagaaaaggacaggaggacaaagagtgagaggagaggagggaaagcttccagtgacggcaggagcttgaggtgcacttctccatctcccaccctgctttctcttgccatggctctgaggatccttccttgggtcctctacctctgagcccctgctccaagaagggctaggagacagagcacatgggacccatacagatgggacccttcctgcctgcatgaatccacttcccatttgtgtcagtggcaactttggccctcagtaaagagtagattgatccacatgttgtttaaccctcactcagaagttcctgtgttatcttgacctctgttctttgaaacaaaactaaaagagaaacttgttttgaaatcagtggggggttgtattctagaatttacttctgctatgcttctatataattttctattgtcaaagaaagaaaaaatttcttattttgcagaaattccttgcccacaattcagaactgttatatactctttgcaaattttagtttcaaagtttccctttaaaaccaaattagagacaaaattaatgggaattcattgccattgtctattttgtattttctagaggtcagcattgctaactcagtgtttcatttcttaaccttcaggtcagagatgaaaggaacatgcttaaggttgtttctcggatgcaccgagtgtcagtgatcctgaaactgctggtgcagcagttttccattctggagacgatgacagccttggacttcaatgacttcaggtgtgcacatttggcattttaaaaaatgtgatggaatttactttctcattttggtggggtaaaagcagcatgtgtgtgttttgtgccatgaggagcctgtcttactaacattttgtcactatatggacttaggggtcttcgatcacaaagcatttgagaagttattaaaaatattttattattcatttttacatgtaagcgtaatatgatcaattgatttaaattcatcactgtgtgttctgtttttctccaaaaagaattttagacaacttagcacattgactaaaatagctaataaaatacatgtaattaaatttaaaagatataaaaactcaaaacaggagcgatatatacagaagcatgtcaatcaaagtagaagttatggattaaaccataaattttacctgtacatttcaaggcaataccatatagatagcttttttcttaccaaaatgtgagaagaaaaaagtttaagaaacttccattgggtgtaggatgtaacatgcatgtcctgaacatgtctgacaaaggaaaagtagaatttgtggtgaatttaaaacgttaaagtcttagcagcagtgaaatgaaagacattcacaaagatataatatggggagtgggagtaataacatttttgatatccgatgatatttaagtagctcatttttctgatttcagtgagtcaaatcacaggtctaactctagacagttgtgtgtatctgctcttgatatccaagagtaaaactgacagtctctacaatctcttacaatagaagaaaccattatggtggttgataatgtcagctcttctcttctctcctctcctctcctctcttctcctctcctctcctctggactcctctcccctcccctcccctcccctcccctctcccctcccctcccctcccctctcccctcccctctcccctcccccccctttctcttctctgctcttctcctctcctctctttcccttcccttgcctttccttccaccatttaatctcaaagagagtacttatctccagcatcaggcttccagagtttgcaattccgactattagaaaacaagataggtgttcttcagaacatgagagtcccttataacagaagacattatcgtgataacttcaaaggagaagaaaatgaactgctacttaaatctgagcaggaaaagacacttctggaattagtggaggtatggattcatacaatttataaagtttaactcaatacatcttcttaatttagcttttgctaaatcagaattttaaaaacgtatatcgaaactgagttacattcagtggaaataaggatagaaagaattcataaaaatacatgaatttgtaaattcatgttactaaaatattgaaaatgtcaagaaccctgctgagaacttcggaaatacttatgtaatcaattgtatgctaatatttaataaccttatcatctcaataaaacaattccttaaatatcccttctaagtaacacttaattagctgatttttagactgagtgtgattatttagtgagctttattgttttaaaatattctgtaattgaaaatttccagttatttagtatttttcttagctgaactaaattactaagaatatacacctcagaaaatgttcccttcatatccaaattccctaaaggtctgtaagtagcctttaggaattattaattttttcttcaaaatagattattaaacaaagattgtattgtcttgctttccattacaaagccttttcttctgcaaattaacttttcttgtgttgaattatactctgctcattaatcctctgggtattgtaaatgtggatttaggttaatgtattatatataatgccaaataatggcagataagaatagggagaaaaagaattacaaagctaatttcagaattataataagtataggttaaatgagaactcacagaggtacatgaatttagttttatttctagatttaaaaacattttaaaatctcaaagtaattgcatggatggttaatttcaaagttgctaagtatacagtgcccatgaatttagaagagatcgtatcttatacatatcgtaatttcttaagctcctatgacataaagtaacttgagaataaaccagaatatattagtaaaataattattaagaatatactctttaaatatgtttagatagaacatatgtttaaatatgtttgtagatttctagaagacaattggaatttctgtaatcacatatttcttaagaaataaagagtaaacattattaaccattgccataaaaattaagaaaattgaatatattaattatttcataaatgaagaaattgaagagaaataaaaaacatttacaaataaaacttgtagcatatgtttctggaaaccatgaagatttcttgttttaagtttatacatgtcggttacaatgcattttacataattttaccatgtactcacttaaaaaataatgtttatttaaggcatggctggaaagaactccaggtttagagccacatggatttaacttctggggaaagcttgaaaaaaatatcaccagaggcctggaagaggaattcataaggattcaggtatttagatgacatgagttaatataaattcaatacagaaatattcaaaattttattttaattattttttgcttttctcttaaccttttctctttctcatatttttttcttagacaaatgtattttcttggactatgtgacatgattgatttcattttctttatgtgtgataaatattatactaaaataagaccttcattgcacgggagaattttgtctatgataactagctgagattaatattatttttcatttctattgaaaattctatattagaaccaattttagacagaactaggcccacagtggactaacgaaccaaatctatttagccctgtagctttgcttttgctcttgtatatttactgggtgctttctggcagctctcagacaatgtcagttttctcctacttaaaagatactgttgattgctcattgcccttatctttcaggtctctcatcctcttggcatgactaaatttcctggaagacttgtttaaattctacatcttgagaggttgcatcaggtagtgctgaaagcatagactttgaagtcatgctacttgggttccatttccacttccacttcttaaacaactatgtgacagagaacaagtgactgcacctctcttagcctatctttcagcattggcaaaatagaaaaataagaatatctaactcataagattattatgaacaggaaattaaataaatacttgtaaagcattgaaagcagaagtcagaatagttatctctcagctaatcctgagcttacttcaagctgtcttcctgtaccatcattctcatgtggccttcatgtacataaatccaatggccatttttaatcttaacttagttgacctcgcagaaacattcaatactaatgactactacttattctttcttgaacattcttttctcttggatttagtatataccattatgtttgcttctaattctctggcccttatttctctatctcttttacttgctcttatttctctctcagaccaataaatggtagagttttgtagtccattggcttagatcctttctgttctatctctatactctttcattagatggtgtcatttatacccactgcttcaatatctacttagccaccataattctcaaacatttatctctggtttatatatccccttagatttcagaacatgtatataataccttacttgatatttcctcctggtcctctcaaaaacacaccaataaaaccaaacttgaacatttccccttccatccactcttgtaccaacattgtcttctctgcattaaagaattttttctcctataatccatctaggctgtcgtcagactcttatcaatcagtgatccttggctccgccctcttgtttcaccacttcttcaagctatcatcaagtcctaccaatgttacctattagctctcaaatatcatcctttaatctaccactaccactcaagtgcaaccctccatcgtttttcacctggactataataatatctgaactgtgctcccccaccttcccagtatgcctctattccaatttagtctccacattgcagtctgaataatcttttcagaaggcaaatctgatcacatctcccttttgtgtaaagccttttgatgttacctcattgtttttaaaattaagataaaattaacctggtctataaggcctttatgatctcacattcatgtggtcaagccatattaagtttctttattagctaagtttagttctttggatttatcaccaaggagtccttttatgtgttcttctctgggcttggaatgttcttccccaactaactccttcccactctgaagatcttggctcgaggaaaacttctttagaaaggtctttcctaaactccttattactttaagttatgacatatagcatagtctatggttgtaatttaatgactgtactgggttattatttgttcaatgtcttattcctaccagataattcctgtataatatcacgactctcaatttttgcacacaattttatctctatcatcttagcatgacatgtattgaataaataaataattaatttgaaataatatgcatataggttagtactacacagtgtggtggttctgatgaattggaaataattgggttaaataattttccccagctcaattaattggcttataagcagaatatgtgttgtaggcagaaaaataagaattttcttaaaccaatcaatagatagatagaaaatgaataaaacatgagtgagaaatatctaagaaattgtatttacagaattcaacactgaatatagaacatagaatttcaataggtttaatagttcttctgactaggaattcttaactttttctaagtgaagttaccttacttcctgtgtttaattcttgtttaaaattatatcattattaactgctggtagttatctccaattttgtccatctgagtccattgctcattatatttatgaagataatatttaatattgagaaatcatttaaacttaaataaaaggatagaaccactgagtatgtggaagattccttctcataagacataatttccaaatagtaatattagaagatacagtaaatattaaaagtacatcatttctgcaaccataagtcttttcctcataagcaaagttttctaaaatatcaatctacttattctctctcaggactattaatgccatatttttcctaaaggctaaagaagagtctgaagaaaaagaggaacaggtggctgaatttcagaagcaaaaagaggtgctactgtccttatttgatgagaaacgtcatgaacatctccttagtaaaggcaggtatttttactttatgaatcttttccctggaatgtgtgaatatgagatcaagacatcattttataagactatcaagccttacttgggagaaatagaatgaaaattgatattctactgatagaaacaaaaatggagtaaatgtttttggtgataaacctattttaacgggtttccatgcccagattatttgaaaaacattagaaaaaaatttatagtctctgccagatatacgggatatcaagatgaattgcatatagtttctcaagtagttcacagcctaatagggacagaaatgaagacaaatcattgtaacagtaaacactatggtagaggtaagaaaaggaaggaatagctaccgtgagagcaagtattgatgtcgccccattgttttagaattaagataaaatctttaacgtggtctataaggccttttatgatctcatattcatgtggtccagccatactaagtttcttttattagctaagtttagttatttggatttatcatcaaagagtctttttatgtgttctctgggcttggaatgttcctgccctctttctctcttcctccctcctttgtgtgtgggtgagttctttcatacaaatctgcttgactgaccaagataccaggaaaagcatacatttagactttcggcacaattagtactgagctgttagttcctgaaatttattgagccataaaatcagtactttcatttctaaacttttgcgttcattttgacttagaacttttattgtaacgcatcccaaacctttttggaaatatgcagaataaaagtaaaaattaacttttataacacaagtacgaaacatagcaatacgtgaaattggtattaagttttataagcttaaaggttgttagcttctgttttctaaaaaaaacaaatctcagtaaagaatagcaaaatcttgtttcgctgcagcagggagaaagtctttcattagagcacacatgtatgattttacataattgtgctcattaaaaacaagttaactaatgtcaagtgaattaatgaaaactactttgaaatgatgcttataacacatcactacttttttgaaatgaaagacacatattcttttactcggaaaatgaattttattatgaaagtcaagtgttttctagaaaaatcaggttttcctaacatgctatttgaaggttttgaaaatttaaaatatgtacatttttagtttgttttttaaaatccaatgttaaaattgtattttaagtgatatgtttacaaattcaacctaagggataaaaaatgtaaactgaaacttatattgatttctaaacacatgtaatccattaaattttttaagatgacgatgccaaattaatacaaaattaccttaaatgacctaaaaaatttaaatttagtatgtattttgcaggtgaaagacggctgtcatacagagcacttcagggagcattgatgatatatttttacaggtaaagcaaatccgaagagagactgaagttaaaattgaggggtggatatggataacatgtccagtataaagcctaaaaattacaatcatagtttaatgcagtaatttagtttttgtagaaaacttggaagataattagtaatgaagttttatgcccccgtccctttttttttcttttaaatagtaaaggcataactttttccctgaacagggttaaaaggggttaaacactacacaaattaatcaaatatcctttttttttttttttttttttgagacggagtctcgctctgtggcccaggcgggagtgcagtggtgcaatctcggctcactgcaagctccgcctcccgggttcacgccactctcctgcctcagcctcccgagtagctgggactacaggcgcccaccaccacgccaggctaatttttttgtatttttagtagagacggggtttcaccgtgttagccaggatggtctcgatctcctgacctcgtgatcggcccgcctcggcctcccaaagtgctgggattacaagcgtctaaaaagcactatgtaacactaagtgtcctaaatggccagtttactctctcagagactcactcatgaaatgtgttctatcattaaacaatgctctaagattattcctgtttaagaaaataaaaaatgcatgaagtgaaaataacttgcaaactgtaccacttattcagcaatttcaagtaaaattagcttcattgtctaaaaagtttgaagtattcctgaaatattgactcactcctactctattgtatgaaggtcccatcctcagggttcatgaattaaatgtgtcagaacaataaacatcacactagtaaaaaaatacctatatttacaggccgtcatgcttctgtgtatttaatttttaaaatcttctcaagtctttcttcaaaatggcaacataaacaaaatcttttgacttttttcctaaactcaagtaaatgtatgccaattaggcatatgtgtcctaactagaaaatatgctgagaaaggtgaagaaatagatgtaaaaaaacaaaacaaaacaaaacaacaacaaaaaaaacaaaacaaaaaaacaaatagatgaaaagaaataaaaagtggtttttccttttgtgttttaatatctttgcctagaagtgtttgattattttcggctgggaaatctgtaatagtgcacctgtctcgcttttaataagaaccaatgttaggtgtgactctaggtgattacttcatgtatattacatggacttttctaggcttcaaacaaacactgcaagttgagtagtattatttcatctttgagatggagaaactgagactgagagaataagccaaagctgccacagctcctcacaggcaaagctgacatttgtttccagggccaactgattgtcaaactcatgctcctcctaacacactcgatttacttgaatatattcttctttttcttctttttttcctttagggaagagcctaggttccaggtgccttttcagttgctgacttctcttatggacatagattcactgatgaccaaatggagatgtaagtccttcccactcaccccatgttgcttccccacatgctgttcctgtgctctttatcttggtcttctgtgtgccctcctgcccactttctctctttccccctcctttgtgtgtgggtgcattcttttatacaaatcagcttggccatcactctctcccagggccaacttattcatatacacactaggcacagtacctaaggcccacaatacttttgggggctcatgaaaatgttttattttaaaatctaaaggaaaaattaaactttaggtcataaaagttttattacataagagtaatttatttgccattatgccaatgcagttttaaatttttaattttaatagtttttttatttttttaaatgaaggaccccataaaggcaaaggtggcatggactcatgagtcatattatgatcctggtctcttctattgtatccatgggctaaatgcagcgaaggatggagtgaaatgcatgtagcctgaagcaagtggagcgctaggcaacctcacagtctcatctggctctcatgtatgagccttccatatggccaagtgttagttgtcaacattttctcagaagcaattatcattaccaacccctcattgttagaacattgtggaactaatggtggaaaaatatccatggagtaaatttgtatgtttgcctagataaccatgtgtgcatggtgcacagaatgctgggcagcaaagctggcaccggtggttcctcaggctatcactacctgcgatcaactgtgaggtaggtggggaaattctcctttcttcctggtggcagtcaccaacaatttgtttctccacctatacatttgctatctaaaaaaagccattttatttgctcctgtctgaactactaacaacacgtttgtagttagaatattccagttcagacttttggtggtaattttataaaatctttaattatgaactttcactgttttgatcctgtatgaaaagggatatggtatcaatggctgcatgatatgtgaggacacaaagggtttaacagtgcttacatccaggcagaaaagtcttcaactcattgtgactcaagttttgaccagactaaaacatttatcattaattctactaatgtcttcctggctagataaatgacacagttaaagtagcgtcttgttttctgatatggctattttatattataaaactatttccatctactccagagagtgccccttttaaagtgtttacaaggaaagagatcaacatttattgaggacttaaaatatgctagagaggtttctaagggatgtacattcttattttgatattcacaatatcatagataaatggacaaatggatacatcgggaaactgaaaaacttctgtggtcccttgaaaaagaagaatcaattcaagaataaattagacatttgcatttagccccacctcaaatctttacagcacattgctttcgtccctactgttattaccagattggttggtttctgaaatacacaggtttaaattttcatcatttttagacattttcactgtccctggaaatgaattctgtaagcacaaaacagttgataactgcctataccaaatgagcacacacatcagtgggtggtgggaataatgaacacaaatggcatctctagtgtgttgttatctcagttttaaaaagacctgaccaaaaggaaggactaaagttttcattttatagagttagaaactggggcattgaagtttaaacaacttgtcaaaggtccttgaattgtaggtgatagaaccagaatttgaacccagatttatttaacttcaaaggcaaatgttcttcctccataaaactgcaacagttaaaattgttgactaaccacacaaaagcaattttagtgttaaaactacttcatggacatttattatgagtctaagatggcatttcaatttattaaacccttcagggcagttatttggcatcttttcagttggaaatatttccaaatgagcatctaagactgtttgctttaaatgtattaccttgcatagcatccttcagaagtaggaaatgagaacacatctttatctttatgaaggtgtcagcaataagactctcggttttaataggaaacaccctgttctaaaacacataatactgttttatgggcataaactttgaaaatggaataaaaagcagacaatcaatactaatactacataatacctaatttaatatatgatatatacaacatgcaatatatattataatattgaatactaactatggaaaatatctgagaaataaattttctaattgaaaaatttaaatatttcatgtcaaccaatgtaacacatcttcatgtatgtttttccagtgataggtacaaggtatttgtagatttatttaatctttcaacatacctgattccccgacactggataccgaagatgaacccaaccattcacaaatttctatatacagcagaatactgtgatagctcctacttcagcagtgatgaatcagattaaaatcgtctgcaaaatctatgaagaatactggtttcacagcctattttttattttctatggattttcataaatacagtttgaatatatgtatgcatatattgttcagcaccacgatgctctgatttaattctagaaacaatttgattacctcttgtttgtgacaagactaagcattaagatgagaaagaatacatttaaatagtaacattgtacatagggtgttttcctattaaaaattcagtttcccctgagacttaatgtaaccacttaatgtaatcactatctcattgtttcatctttataaacttgtaaacttcatctatttcaaatattttatgcagtacattatattattctgtacaaaggctttcaaacaaaatttttaaaataataaagtattaatctttctccctgta

SEQ ID NO: 78 - DNA, 53533 bp, Homo sapiens
ttgtccccatgctggacttgccgggcctgggggccttctagctggttctgcagccgccttcccttgtcagaggagcttgggcacctgcccctcgcggagctccccctgggtgctcacctatcctgggataaggaaaggcgccccgaagaaaaggagcagccgatgcctggggcaccgagggcgacgccgggcagaccagggaggcactggcgaagggcaacgcgcgggggcagggcggagaggtgagggaagctgcgagcaactccgcccagccccagccagtcggcccaacgacccctgccggtgccccagaaactccccctcccggctttgcgcgcgcggcccctcagaccccagtgggtttccctttgacctctgaaggtttaaagtccttctctggctgggtctggccagccctccaggagcgatccgtctgtagtccccaggaccccctccagccgggcaccacagcccagccacagcaggtgcggggctggtggtggggaggggagggatgggggccaggatttggagcgtgtgactcaggagtacgggaggaggggctaagaattcaagaagcctgtgtgagagcagctcggcgctccggcacagcagagagcgctgggagccggaggggagcgcagcggtgagtcaggctgccccgagccgatcccgagaggggcgcagcgcgggcgcgggcaggggtggctgggcttcgcgggagagtttgcaaggataccggtctggcgagctctctggttacccccgaggctcccgcaggccgaagagcagccctgagaaatgtcccgagtgggtgtgggggcgcgggaccctcgcgggaggacgagtcggaccgagggaacagcgttagttctggtcgtggagtccctagtcccaggatggcctgcagtccagggagcagccctggcgcctgcagaagcccacggccatgccagggtctagctcgagggctagaagtggataacgcgcaagtgagggagagcgaatgggcgcggagagggatgcgccggcagctggcgcgccagggcgggaggagtggcggccagcaccgcggggggagcgcagagcgcgctggctgaggtgagcgccgagtagggaaagtgctgcgcggcccccaggtagggggaggagcggaacggggcgcgctagacctggggcagttccctcagcgcgtctcggaagggctgggagtcgtgactgagggccccgggggttaacgcaggaagtctgcgagccaacgccggggtccgtccggcgtaccggggccctccacggagccgcgttggacaacctcaggtagaggtcgccaaggttcagccctgccacttgggtcacacgcttcatctccagctgtctgctgccaggtgtgggagaagcgggcgtggaaggttagggcggggagcgccttgagttcaggcgaggaggatctaggggagggagagaggactcaggggtcagggagctgcaactttgagccagcagaaacaagcagcttagctccctctaattacaaacctccttctaaaaaaaaaaaaaaaaaaaaaaaaaaaaaaaaaaaaaacaaaaacaaaacaaaaaaaatttcgagattcttaaggaaggtgtttcgtgcttgaactttttcttctcttgtgatttgagagattaaaaaagagcctgcttgctaggctggtttttccaagttgttccaggttggaagttgtaacagttcgaaggataatttatgagtgtttcatgcattaaagtgtattacagcaaagccttttgggtgctgtgggtattaaggaaaacttagtgcacgttcccagctggaaaccaaaatagtgctctcctgggtgcctctgccccatctgtcatccaaggccaatggaaatcctgtagaaaagtcacttgattaattgttctggctccatcctctgggcacacccactgccagtgccagtcccctcctccccaatccatgcacagccagctgcactctgcaaatgcagaaatgacagtggagaccccatcagtaacttctctccagggtcctcaaactcttgaagccgtcagttaagtctgctggaagggaatctttccccttctcgaggcagtgcagaagggcagcagccattggcccctgccagcccttcttatcctgtgtttacagtttcctcctgaatgtctgaaactttctccctctgcagagtcacagaagaaagaagaaaggctgtatcaaacctgatgggtctcttttgttgaataagtcatacgtcaacctgagcaacccaaatgtcaattcatgatgggcagtgtttccagagggtcagaggagacaggcgggtctgggggctgagactggcctagctggaattgactcacacagaaagtgaacattcctcttgttgaagggggatagggttaatgccacatgttgccaaactcctaccccactctttccccaacatctttatgcaggtgaagggaaaaaggaagcaccaaaaatgggaagccaagatcactggggcatgagaacactaatttgacagaagtataggagcacctcagaggattttagaaccagctgctggcaccactgcatttccaacagcagcccaggcccaccagagaaatgaactgggcccactcagggcagtcatcccggtattggtgactctttccctacttttaacctgtaccaaggaatgaggttcttgccttctcctattgcccaccccacaactctcctgccccaagggccagtgggagcaaggaatgaggcttcacactctcattctctttcagggagaaatctgtgccttggacaagaagggggccctggttgccgacatcagcagggagagtagggtagggcagggcagggctggagcccgagggaagtttctcatcattaccgagaataaactgatgaaaaaaatcacacaactttactttttaaagagtgctgagcactcctgctgctcattgatggagtgctttactgcagtaccctgcatcagagcagcagggaaactacacagagattcagccactgctcttctctactgggcatggagtagggccaaggcccagatccccaagcagatgtcagtgccagacctgggagcagaggcccagccatttaccttttccaagtaagaactttcactgacttcagagtctagagcaagccttaagagacctttgctggcagcaaattctctgatctcaggaagcagtggaaggtttgctgacggcttgcataaaatctctggatatctgtgtgcaaacaacccatgctcccagaaaacacctttctgtgacacagaaagagttcctgtgtgtttctttcactagctgatctcacaaaccatcagctctcaggcttagccagttctgagaaatcacttctgtggtggaccattttgagaaaacagtgtacactggcattgggtaaataaatgaggatgaaagacccttccccaatccattcccatgagacatcgcttgataacagtgggaaaatagttaagatcctaactccaaatagcagtaaggccaggatgatcctgaggctgatatgtgaatggagaaactgaggctttggggtcctcggtcttttattaggctgtgcagaagcatagaaacgtcactatttgagccgaggagaataaaccttcagccacaaagtttagtgaagaccagaagaatgaaaacatgcaatggagaagactttctggtggttcgtgatgttttcattgctcctctctgggctactttacatgcttttgaggcctcagactaggacacagtaggaatcagattaaaatgttaggatgatcccttgatattcttctcctatattttgggtaaacttcctgttacagtttcctcacttgtgagaaaggaagggaagtagctttgtgaccttgagcaagtcgctaagcttctcaggcctcactttcccaactcattaggcaagtatattggatttatattgtttctgaatggagctgtcagcattttgggacaattcttggttaagtgtgaccaatctgcacagtgcagatagtttagtattcctgcctcacctcctaaatgtcagaagtcatagtgacaacctcaaatgcccctcataaagggctaagtgtattcaaagataatgctgctcccagttgagaagtcttttggaaattaccaataagggccctattgttggggtttctgtggttaatcatcaaactggggctccagaagtcaattcctgggcttcatcctccaagagccagcaaatcagactctaggccaccatcggcagggacctcagtgctgtagtcccaccaagtgtcatcctttgccttttgtgagtgaagtggactacaaatgacccatgggaaaagaaaatcagaaagagtaaggtgaagggacaggtgctattagagcatggcagcttcctactctgccatatgttattaaaaacacaggcagactgcatgcctgtggagtctgcagcactgggaggaaatccttccctcctttgctaagtggatcacactctggcatcaggaggttccttccctgaagcagaagcccccaacactgaccgcacttaatacaacatgagtgcacattgacatcgaattaatacaactgtgcccaagctgtgaaaataaatgagaattgataacgtgacatttccttgaaaaaaagtaggctagcaacactacactcgagggatggtgcttgtggcactgggtttattctcaagtagaatagctcattattctcacctctgcttcaaggtctcattgggggacagaaaatagaactatttgtttatttatagtacctagggttaaaatgaataatgtcttcagagggtaggagggtattataggaacacatgctttctactcatgcccaactcattacaagtaggagtgaaaaggaactgcagagcttggcgctgatttcaaatgagggaaaaaaaagaaagaaaagaaaagaaagagagagagaagagagaaagaaagaaaaagagaaagaaagaaagaaaagaaaggaaggaatgaagaaagagagagaggggggagggaggaaggaagaaagaaagaaagaaggaaagaaagaaaagaaagaaagaaagaaagaaagaaagaaagaaagaaagaaagaaagaaagaaagaaagagaaagaaagaaagtcttaaggagctccctccccaaatgaggttgatctgatgatgaaatctgtcaggtggaactagcaacaatgcttttgaattgcctaagactgtagccaacgcattcacgtgcgggaagtctttttttttttttttttttttttagtagtactattagtcagagtcagacagtcaggatttccctgaaaatccaccactgggctaagcagattgagatgttttggcacttttggcaccgcctgtggtggcttctgcaggtggagagccctgcgaatgaaagaagctggctatgaaatcagtgggaatgaaccacccaagtttcacacagaagcccttccacattgggcaatttcaatccactactacaggaacagtttcccaataaccacgaagtatttgttgtcagtacagatgggctgattttcccatttcctttggctgctccttcagtagtcagagttggtggtataggtcacctcccctctgtgtgcagttgctaagtgagcccagggaggatggtctcaagagctcagcccttgcccaggttagggggtgggggagactgtcctgacttcagttcttcatcattacagatggattacaaccctcattagtaatggagtgacttgcatgtctcacttgctcagtctagtgaaatgccaacccatttttggatctgagcagacctggctgagaggtcaacgattgaggtactgcctcatcactatggatatgtattgaacccccattgtgtatgagtgatgccaagtgggacaggctccctttggattatggagaacactttcagaaaaagaagtcacactgtttctagctgcctgagaggtgctggactagataagcagggggaaggacggggtactccaggaaagtggagacataggagggcctctcctgtccctaagttttctcatctgtaagacaaagatattagtagtagctatgctgtcatctggctgttgtgcacattaagtgggaaggcataggcaaaacagcagcacaggcctggcatgaggggggcaccaacgaacatgagcttcctcccctcacgttctcccttggaagggctgatctgaggggagcccccacttcatagttgtttttttttaatttcaggtaggataacatcttttttgtatgtttttaatgtatctgtgcatatatagcttttctgttttgggaggagaaatctttttggttgcattgaagacttctctaggaatttactcactgatattttgaccttctgtagttaacattctcattttgatagaattttaaccaaacatttcatcttgcgatttatcttcgccttgtaatgtctgggtaagagaagactcacggaggttctcctgtaattttctttcagaggcaaacttctcctcagactcttatttcagaaatgttatgcaatgctctctaaataaggcatttcttgagaatgaccatgtttgcttgcagctttaagaatgttttgcttccttactccacgtaacaactcctctgtgtctttaggattttaaatgtcttaggaattcttcaagtttacaagaaaagaaagagaaagtgaattttgctatggcagtggggcatttctgctctcccagaccaagagccaagggttaagcagctgttgctgaattacatagaacctgtggttaaaggggaagattgtcctcgccccacaggggagggggcccaccatgtatgaggctactggatagattttcttctctcaattagcatccttattaatatgctacctgggacactgggcactctggggactcaaaataaatataaatcatgatcctgccccaaggagcttgctcaggagtcataactaaaaggcttagtggctcatgagagaatataaatgagctgaggccagagattgctggggctgtgaaaaactagagaggctatgcctcattgttaagggacaggccaaccattgctgtaaaggattataggtccaatacagatctcttcaagaacttttcaagaaaagccaaaactttgagactgaaaagccaaaactctgaaatttcttcactttccacacatgggtacagaccaaacaaaatttgtctgcaggctttttaatcttcttatgtgaattaacacatggagcaattgcaagcagtatcaaaactggaactagtggaagtactaattctgtgaatatatgacctccaagagggacaggtctggatgtcaagaaggctttcagggaggctcctcggagggcagtgaggggctgtcccataggcaggtaggattttacaggagtcctggcacacagatagaactggatttaggtccaagttcacttctcattagctctgtgagcacattacttaacccctgtaagcctcagtttcttcatctgtaaaagggaatcatgatgccaactgatttttgagggcaattgtgaaggggaaaggagagagtgctggaaagttcttacctcagagtctggaatatagccaatgcccagtaagctgaggccccttcccgatgtggaccccctcattgacattgcagacaattgcttttcaaggattttgaattgctttttctgccccaggaaaagcacaggaggtctgggttatttttctcctctgctgccctcttcttgcttctccccgaggcctgtggctgcttgcccagttgccctttgtcagaatcccaccctttaaaagcctgacctgggccacagcagaaatcacaaccctactcagtaaggagaagtactccaggaggctgtatagacacgcacggcaaatatttaaggaattcttaggaataaaaaaaattcgtaaatctggatttttgcatgaggccatcacaggaacatgttttctcaattagcgtgcacattgcttggagtgaagtcaccgagtccacagcccatcagggctgactcgagctgagccacctgatcagacttcactttccatgacctaaatgtgattcaaccaacctgccactgcccctagctgctgaaacaaaatcatccctgaaatcccaaaccagggtggagatgtacatgctcctctgaaaagcaatctaatttcagatcctggttgtattcaccccaaattgagaaagacagcactactctggagggtggattgatagagtcaccacaacaccttgcatgtttcttttcttttaccatttattgttagatggcgactgtgtgtagcctttcagaacagatgacttctttaggttctgaaaacagagaaaatagtttcttttgctaaagcatacatcaattgcctaaaatattagcagtcagtgcctgagatgagtgattatatattctggatggtttcctggactgactcttttccaagcaaatggctttgtcagatatttgtaatttctgaaatattttattaatgatgtcctcttgccagagggatggtccagagtacacaattagctgcatgcctcagaagcgagatgctgcccagcatccactaagatcaagcaggagttcaaggacacttctaatcaactgccatagagcagagaacagaaaatgtttttacaagttgaaggccgggtgtgtggcccatgcctgtaatcccagcacttagggggctgaggcgggaggatcacttgaggacaggagtttaaggccatcctgagcaacaaagtgagaccccatctgtacaaaaataaaaataaaaaaattagccaggcatggtgacatacacctgtaagtcctagctactaagcagattaaggtgggagaatcacttgagcccagaaggttgaggctgcagtgagccatgatcatgccactgcactctagcctgggcaagataagtgagaccctgcctccaaaaaaaaaaaaaaaaaaaaagaaagaaagaaaaaagaaaacaaaatacaggttgtgaaatcaacttagtgtgcaactctcattagggaaaaaaatgaaagagcatagagtaacattttcaaaaattaatatgcattggatatagcaagggaaaatttttatgaaacttttgttttagttgtactgtatgtatgtacatatacatatatatgcaaactggctcatgatggaaaatgcattttttttactataagtcatagtcaaaaaaagtgtgaaagccactggcatagacaacagcatgatttcgaacagcggatggctctgaagccaggcaagcttggggttaagtcccaactctgtgatttgcagttgtgtgatcttgggtaacttttgttctctaagcaacaatgtcctcatctgtaaggtgagactagtttctctcttgtatagctgttgtgtagattaagtgacaaagtgtatgaagtacatctgtgaagtacatacatagatgtatgaagtacatactatgaagttctgtgcctgccaccaaggacaccctcagtaagtgagagctgctgtcatcatctgccttccccttgcccattcctcctccttctcttcttcctctccttctcttcttcttcctcctcctcttcttttcccttctcccttcctctttctacttccttctcctcttcttttcctcttctacctcttcctcttccctctttcttatcttcattgtaactactcaacctcatcagaactattgacaatgtttttatccctaaggtttgctttttctctggcaaacacagcaaagaagcaacaataatcgtatcctgtctttggccccaccttctgcactgtctttctcccatttcatgcttgcaaagccatctttctttgattctcttccccaagcatgaccataacagtaattgtccaaggggcacaagacatcctcctccctgtcactgggcactgacattgggtagcatggcctttcatggccttgccactggggtaaacgctttggtcctagtgtgggttcagtgactttggcaggagcttctgatcccacaaaatcatatccttccccttcagtatatttttataagaacaacagggctaagataccattaaaatgttgatattgtcaaaattctaaagaagtttctgcccagagcagagagtctaacattttctcctgagcgaggctccaggctgccacaatgcagagggtttcaatttctcccctggtataaacagtttaaaggctcttaatgtgaatgctggagctgacaccttcaggtaaaccctgatcctaactccagccctcaacccaatgggcaatctatcactgacctcagacctttggttcccagtggagggcacatgaaagagtgacccacaccaagattctaccttagggccacaaaggtgacatgtcccaattttcttgagagcctggctaatgtagcctctgaggacagatcagtgatgacaaactgcctacctcttagttctcatggaagcttagcctgcccccattctgtattcacccttgttcccccagggctcattccaactctctccctagtaaaatgccctcccactgggccccattttcaccgctagtactcagagaggattattagtgacatctcctctcaaatgctgaattcctgtccagaccaaagatttaatgctgctttttaggcagctaagatatctctatttgaggttgcaaggtagtgggacagaaggcgagaaaagagacctgcttctagggataatgttcatctttttaagtgtatcctcttctctccaccgcttattccactattgcctgtaaaattaatgtcgccaagccagttgtccatttcaaataatatttatagcagaagagagacatttgtcacatcatgccctgcccccacctcccaagcaggtgaatgatattgagccaagcaccagggagctggagtggactgcaaacaagccagcagagagatgtttaaattcattgctgttgcacctgtttttaaaggaaaaagcaaaggctgacttactttttttgtgctgaaaaggtggcggggagagtgtatttccaccctttctgaaaattgcaatgacaaatggaatcaattgcccctgaaatgacacaccactaagaatgtttcttacgcatgaaacgaattacctttcctttcacctgtgttcaagagtgttgtgtttgtgttttcacagggaaagtgtgaacactagaaatgttttcattttctgttttgaagaggtcagactccaaagcttgacttcagatttcatgcccatgtgtcagcatctctgtgtcttggaaatgaaagaaaatattttgggggtggggttttcaagtgctgtttttgaacttttccaaaaaagagcaggagatgtcagaaagcagagagcttcataaagcaacacaaatatgtttcaaaggttctttttaaagcatctttatgattaagccaaaaaataataattttaagttgacatggtgcacaaaatgttcatcttccagtcattttgacttcttaaacgactatgaacctattacagaattctgaccggcaatactggtgtttagaaaagtttgtttgtatcttctttcttttatggtttgggaaagttattatgtaagaaataaaaactaatggctaagtcagggatagattatttcagctcagtaatacctagatttaggagatgaggaatttattcctgattcagaatcttactagtggtataatttaggcaaattacagaacctctctgagcctctgtttcttaatctggaaaatgagaataatgctacttcccctgcatatctattagggctgttgcactggatatggttgatggatggggaaacatcttggttgtagacacagaaggtaagatgggaaaacctggaccaggagtgtgaaactccaggtgctcgtgctggttctggccttagttgcatgagggatcttgacagtcacttgccctggtattgagcagttctggctcctcctggtccattccaaacgcagtagcagatgtagatgcactcacataaacttgagcagagatgaggtattcctgccatggtcagaatggaggtctgtgccaggcattgagcggaaccttgtgaggcagaggccaagaacaccacagaaaaagcatgaatgtggaaacaggctttccaaggttccagtcccaggagtcgtgcttaaagtgcatgtgatggaaagcgagttgctatagtgccctcattttcagtttcttcggctataaagtggtatcagtaccacttatttcttaaagattaaccaaggtggcttttgctcaatcgtttggttgtctaaaacttggatatagtaccttatagtagttcagtaccattgccaccaccattgaacacaaacgaatgcctgaggagctccccaactactcagtctaaggcagatgtaacaacagtgccaggacacctcaggaatacacatgtccctgtctcttctcctaatgtcccttctccctcattagtcctcctccctggcctcgtttgctggcttctccttattctctgaacctctaaatatggtgtgccctagagctcagctttcctttctagatcgccctcttcctggatgatctcatcctccccaggcatgagctacgatctacgacttccggatgttcatttccagcctggatctctcccctgggccccagactcttatattctactggcatgtctacttggatgtctaaaggacatctcaaatttagaattttttttaacccccaagctacttttctcctagtcttctctactttagataatgacataattattcccacagagtaatctagaaaccatacttgattctgccttccctctcaccttttatatccaattcaccagcaagtttgttggcttcaccctcaaaatgtagtcagaatccaatcacttcttatagtccactgctccctctttaatctgggccagggtcacctctcatctagacctcttcctgcatctcctgcctctgctgttgtttttcttttaggccaacagcagccagagtgccctttaaaaatgtaaattgcaatggtttttcccagctctgagcctcccatggatttccattatatgtagaatgaaattatcttgccatggcttttgttcagtggttcttaaatgaaggtgatttttctcctaggggacatttggcaatatctgtgaccacctcatttctgtggtcataaagggggtggtggaggcttcaggggtgttactggcagccagtaacaacatgcacaaaacaacatgcacagcaaaacaacatgcacaggacaagcacctgcaacaaaaaaatcatctgacccaaaatgttgatagttctggggtggaggaaatctgccttatacgatctggaccctgactgtctccagcatcttaatcgctcctcccgttgtggttgtgtggtgaccacactgacctttttgcaatgtcttcaacatgccaaccttgttactgtcctggggccttcgcactcactgtttgctctatttgggacactcctacccacagatcttcacatggttagcttctgatcgacatttttaggtctgctatcacctcttgatcattctaatctaaatatctatcctacccccaccaagtcctgccactctattcccccatcctgccttacttattttttaatacttaattttatgatttgttttcttattttattatctgtctcctccacaagaacatatgaatgagggcaggaactttgctgtgtttattgagggacccattcatcatgtagtaggagctctataagtctttgtcaaatgagtaattcaacaaataattgacaaggatagcacagacacagcctatgacagaatgttaggagaagagatcagcgggatctagcatttcagggaatgctttctggcgtagaccagccatgggctgccctgtgagtttccggagtaccccactcctccagatgagctagccctaaaatggagaagggcttcctctcaagcatatatgcacccacagtagccctcttgtagagacagctgtggattttaatctgtgataggacagagacccaagctgaagggctcaggggtccaggctctgatggaagagaggaatcaggaaagaaagtgagtaggagagaagcagggccaggaaagagaagccgaagctcaggttggctcaggtcaggaatggagcccagtatagagggaagggaggggccagggaaggacagctccagaagaaaatctctaggttggctcatcctggggtgaagagccaattgaggaagctatgaactggaaggcagataagggacaaaatcaaacctttcatgtagcctggcagagactgagtcctgtttagacatagtgacccatatagagccggtaccacatgagaaacatgacattatgacacacacagttagttccaggacagtcttgattccaaatgctctgacccgtcatcaaacattgatcttgtccttcagttttagaaaatcatgacagtaacaccacatgtaacagtgcttagcaatgccaggtgatgggtgggtgttcacctccatccaggtgagccccttgtaccatctcaaaataatgatgttgatgtccagttcttaagggagatgaagcgagcagggcaggtcatagatcatatttccaaggtcccgggattccaggttatacaaattctggggtttgcagatcacacagtctcccacaggagagggatgcctggtggcatgtacacagctctggccatcctgtcactgtttccaagagaaagggtatggtcagggtctgtgccctcagggccacctcaggacacttactcataactctggttcgttttgctgcctggatccttctgaggagatgactacatgtgattagctggccaacacctcattttattagtctgttttaaagttttaaagtaacacacctaagatgcaggcagcttactccaacctagcaaaaatgtcattatgaaaatttacaaggtctacagagtgatataatggtgatgaaattcagatgtgtcaaattaccctcatgtttaatttagcctgactcagtccatagaaatatggattttcccacagatgtagtctcatagctgcctgggcactgtgtgctttgcagggctgaggctatgataaggttgcctgtcccacagcctcagaagtcataaaacagcctgtgctgaccatcccttcctgcttccttagagagctgctgacaggccactttgtcttttcattcacaaaacccatctgccaactggtctttgggatccccttccatcattaggtcctcttcttggtggacacagatttggtactctcaaacttctgctccattgaagcatgatctctggatcttcattcctactaagaaatacagggctgatgaaggctcagacccatactcatcccaggggcagattctaagcagctgtcaagttctctcagttagaaaggtaataaatgccactcagcaacaatggaacaagcaaaagcctggccctggtccttccttcttgctagcaatgtgactttcaataacttgtacaaactccctctgattctcagcttcctgaattgtaaaaccagaataataataatactcccttataaagtagtgattgtaaaaagagaacatatgtaacacttagcactgtgtttggcacataaaagctgttcaacaaatggtagctatcctcattatattattaaaatcttgggaagtaagatttcagacatcagtcaatgactcatggaaatgttttagagcttgaggtctttgcaaagtgagagggcaggagagtggagtcccatgcaaggaatgcagaaggtcgtcgccatggcatcatggtgactgaccactcatttgtgggctaagccccattaagccagctgcaaaatgggggtaataaaaatgttgctataattattaaatatagcaatgcttataaaatggttaacatagttccgggcacacaagcctcaaaaactttagagttgttgttatcacaaccagtcttcccttgctagctcctctgtcatctctttacgctggtcaagccactatttagacaggtccaacctgggttcctaaggcactatttcacaatttagggggggacagtgcagcccccaccctaaaggtctcttagtgtcagagggcatttatagcctccaaaaatcactcccacagatttctggggcccactccttgtagcctccaggtggctttgtcacatgtaaaggcaatgtcatgctatgcacagaaagggaacagcccctttcctttcttaccatgggcctggagttggtcccacctggctgtcaccctacattcctgggatggtcatgaaagcaagggatttgtaccccctgaaaggaatttattcagcaccatcaaagagcaaggcgcccagacttagcttttgccatgggccctgccagaaagtgctgggcagggacagaaaagaaattccagagacaaggtttctctagtgtccttggacttggggagaagcaaattgtagggttgtctcatttatgatcaaaggtaccaaaactttataaaatgccgtgaggatattttgtctgtgttcctaagcaaacagaaaaatggagaaacattttgggtccaccaaaattggtagttaggatgaactcttactgcaagggccacgtctatctcaagctaattctgcagcaagtatgactgcgtcctcactgtgtgcatgcactactctgggcttttgggggctgtaagaacatttaagacttacacctgcccataaggggcttgccatctgtttggtgcttcttatttcagttttaattacaaggaagactttagccttttgggaaaagaatcactaggatgaatctaatactacagagctggctgtcaggcagattcttttatgaccctgtggccttggacatgaaaaggaaatgaaaacattttattataaggtttcttctcccctcctgcatgctctatcatctgcccttggctatgacacacacacacacacacacacacacacacacacacacacacacacacacacatcccatacacacatcatgcaaaagtggagccatttctgaggcaacggcaaacattaaagaactgcagtcctttcggactcaaaaatccatagaatcctagtgttgaaagaataatgggaaataattcagtccttttgtttataataaatgcaaaaaaagaaggaaaaaaacccaaaaagctggtggatgaagttccttgattaaaaatcacagtgttagtaacagcccacccagcccagggctcagttcatttcttccttccattctttcatcaactatttatgaagcaccaacatcataccaggagctgtgctagccactggtgatacaacagtggaaaaaaccatacatagttctctccctcctgacggggcttacagactagccaggaagataatcagtcagcacacaaagaaatggccatttccacgtgctaagtgtcatgaaggagagttccacgtgctggtccatactgcatcttagtgggcagagcaggcttcctggaagaagggatgattcatctgaggtctgaaaagtgggcaggagaaggagaggaaggatgctccaaagataaagagaggtcctccagaaaatgtctcacatagtggcggactgcagccagctcacacaggctcacccctgctccaccgtaagcttctcttcccaactccactcccagtgaggccacacttctaacctggaattggccacactacggataatcacacagcagaaagtagcagatgctccaaattagggcttccacctccttctgctttgtagagccattttttaccaacacttcatgggcttcatatacagtggtcacccccttagctgtggtttcactttccaaagtttcagttacctgggatcagttgtggtccgaaaatattaaatggtaaatttcagaaataaagagtttatgttttaaattgtgcgccattctgaatagtgtgatgatatattgcgccatcccactttttctgcccggaacgtgaatcatccctttgtctgctctctaggctacctgccccttagtcacttagtagcctgcttggttgtcagattgactgtcactcattacccacttagtcgctggtttggttatcagatggactgtttcagtatggcagtgcttgtattcaagtagaccttattttacttgataatggccccaaagcacaagagtagggatgctggcattttcttataattgttctattttattgttattgttttttatctcttactgtgcctaatgtataaattaaattttatcataggttatgtaggtttggggaaaaaaacatagtgtatataggatttggcactatttacactgggggtcttggaacatatcccctgtgggtaaagagcaactattgtattccacctgttttcaggctgagggtgacacaaacactgccctttaagccaccaaaggcctggtccttctcctgcaaaaactctaccaaatgcctattcccagaaaggcactgtcaacaagtgacttggaccttggggctgtttatttcagaccctgggccatctggattctcccaggatccagaacgtccgcatgagttaataccaggcagctaagaaagagcctgttcttgtggtcttcgccacccccttgccatctaatgatatttatcaaccacccacgcctgcccagtgctgtataagacacttggccaggcagatctcaagtcaggctttgacccctcaggaattcagggcctggctgaggctgctaggctgacattgttcttccttaatataaggaaaaactcaggccactgggggcacaagaacgagggctgggtgcccagctgagggcatggtttaggagatggtactgctgcaattttttgtttgtttctaggcaccagaaatgccaggtgagtaggggtcagagttcatactatgtatgattttgtcaagttttaaaaacaactgatgctaccacccttgtacccgcactaccattccacttctccaaagaaatttgccaaaagaaaaggtgagttttgagttctactaagtctgttaggaagcaaggatgagcagccatcccagaggcgagggttttgcagtagcagtgtctttgtttccaaactgtgtgtgtacaggtgtgtacatgagtatgtgtgtgtgcgagtacatgtacacatgtgtgtgtgcttatgtgtgtatgagcatgtgtttgtgggtgtgtgtctgcagtgcatacagaatgtggagagcaacagtgtctgtgcagtggtgcagggtgcgaaggaagcagccagacaaggctatgagatggagaatcttgaagaagaaggccagtcaccgggtctggttaagaaaagaaaccaggcatcctggatggacagaattcccttctctctggtcatctctcagctccagaagggagtgagtgactctcattcttggcccatgctggagaagacactgtggaacgcaaccacttactatgctgacctttagtcagacttaaatgctgaataagacctgtatgtctccccaccaggacgctagtgagagccaggcaggaacatacagagtttgaatctggggagtcccatgaagccattcaacagcatctgtccatagccctgctgtaagctacacttgggccaacagtgtgtctccaggaagcttccacccaaaagcaagaatgagaagtgatttgggtggcattgccagctattgatggctagtcttgaattcattctgattgtcagctgcatgtttgggagtggggagcaggtaggagtgggctcaggggaaatgctctcggaagggcttactgttgggagagtagggacaagcaggtgggctgccagggaggtggggatgtggtgatgcagaaagttgctatttgaaggctctacatagagtagagaagtaacaacaaagaagagaggtggctggagatcacagagtatataggggtggaggctggtgctgggtgagcagacagactgttggaaggtgggtggacatgaagatggcccttggctgctttgcagagaagttttgccccctcccaggtcttgcttcctccttcgccctatgctgtggcctgtcggcacagctcacatgctactccttttcctgacactgccttggagcctggggttatccattgaccccatccccaccgctggcaaagtataatttgagggtcctggcccagacagtgagagtcagtgagaaagcctggaggggaagcactgtccaattctcggtagagggactgtgggcagtcaccattaaagctgtgcaggttgtgtcctgtctagggcatctagctaaggggatgagcaggggctcagctcaccaaaccatgcccctggcaaggagcggcctctgcctaagaaaggggcatttcttctaattcacatgaagcttccttaggacttagcttcagcccccattctgggagcccctgcaggccatggaagggaggccccaagagagaatcgaaaggccagaaaatgagagagagcatatacagtggggtcccactggagggggcagcctttggaacagggaaaggtgaagaccaatattagccactttacaagtcaccgagagctagcccggggctatcattttactacactgaaatgcttgtggtctgaagatgaaggaatgttttccttattaacattgaaatacttaacttgtttatgttattatgctcattgtgtaaacattgttcaataaaacatcttattgctgataattttccaaatgttacagtaaacacgggactcctgccagcggcagggatgcatttcaagttacacagtgagcaaggtgtttgctttgctgccagagtcacttgactaaggtctcctgactgtagcttggccgcaacttcttatcaatcccaggtgaagagcgctctgataaagagcaaattattctctgtggtcagatccccaaatacgtgggtgacaaacacagtggcattgtttccttgactgaatcttgttttccatgtgtgggaggaattccagacttgagaattctgcatccagacttcatagatttcttttttctaattgagacaacacaactaatgataaagaacaataccagcctggcttttaagctccaaaaggctctgggtcaaaacctgacctccataggaattggagagggtccaacagcaactactctcttctattgtcaagctagaccgtgggcttctgcagactaactttccattggcttctggagcatggagacagagcagatgtgcctgcctgctaatgtgctgtaggatggaactgcttgcccagcttattgaaatcagatgcacaacactcgagctgccctgcaaacagatggtggctccacgcaagcgccatcacattggaaaattacaagggccatgactccatcccctctccaccatgcaaaactgcattttttttttttttaccaactgggtaagagaaagtccttctcttctccatacatccactctgaggggccaggcgcttgtgaaatatagcacttctagatcgctaaagtaatatgaaaatttgaataccatggacaattctggaaggatgtaccctaaatattaatattcattatctctgagtaggagggaattggaattaaaaagcagcatggcatatctggacttgtacacacttctttgagaaaattacacccaattcccaaatagtattcaacttgtcagaaacaaattctgagattgtttggaaattcttttttaatatgcaatatcccttaacaaaattttatcttaaaattctagataagcaactatttcaattggtctaaattttaagtttaatctaaattatattgaatttctttgagaatttctaggttaaaactgtaatctgagtaaaacattaagttagagtaagtttgttggttgattttggatatttacataagcaaacatgtatatatagcttcagtttcctcctctgtgcaaagctctattcatagggctattatgagcattaagtgagatcatccatttaaagtatttaccataatacctgactatacaagatatataagaaattgtagctatcattagctatataattttcatttttcttttaaagatgacaccaatttctgcaaaaaaaacaagtggacaatcaacaaggagatatcaattggcttattttctgaatagatgtgagtgtaaaacaaacatccagggcccctactcaagtcctccagcccacattggctcttagatctcttcccagccagccctagatgtaatgaatgctaatttggtgtggcaggagtttaggactagaagagaacttagagataaccagtctgggtggtgagattgagcccaaatgggtgatgacttccccatgtcacagagcagcaaagacaagactctagggccctgactgctcctcttttcactccgacagatggtctctctggttgatatataatgacattgactcccgctattgccttttactacattgtgatatcacacagcacatagcacagccctgggtgcatagtaggtacctgatgaatggtttgcttaatccgctgatgtgccaagtgtatgcttgacaatctaagagacaggaagtcaaataagacagaataccttcgggaggcttcaagagactgacaaggaaagtcacagcaggggacaagggggtcttagaaatgggaaatttgtttaacttcctcgacagtacaatgagagtcagaagtcgaatcacgtaatgaacctcagcgagctcgttcttcgtactccctatgccagacaagtcccaatgctactacatatttaccaaatgtacatttatagcccttgacctctcccctaactctacatgtctatatcaactgcctattcaaattttccatgtgtatgtccaatataaggtatctcaaatatagctatctcagtatataggtatctcaaatttgacactttcaaacctaaactcttgattctgccttcaatcctgttcctccttcagtgttctccatctcagtaaatctcacctcctttcagctgggtgccaaaaagcttggcgtcatcctcgatccccctgttccctcactcctgcacatcacagtctgtcaggaagtccttttgaccctattcctccaatatatcccacttccattgtcttctcacctctgctacattgccatgaggccccagaccatcacctcccacctggataattgcaggagctgcctaactgatcttccggtttctcttcttggtccccattgtgtgtgctcagccacagtgttcctcttaaaatatatccagtcatgttgctttctgctaaaaatcttctaatggcttcccatctccatagaaataaagtccaaactcaccagggtccataaagccctacaaaagctggttccagtttcccctcagctgtcatctcctaaaactctgccccagccacaggggcaggtttgctgttttcagccaagcaggttcttgcctcaggacctcacactggccatccactctgcctggaatgtccttcccacatttctgcatagctttctcccacacttcattcaggtctctttgtaaacattgcctcatcagaaagacctttcctgaccaaactagcgcctcaacttataattccaaaacacttactgtgctttatttcttccagcacttatcaccaacggacatttcctgttaatttgttatttgtcttctgtccacctccacgagaatttaagctccctgagagcaagaatttttctgttctgttcacgactatatccccagtatctagaatagtgctttggtgcataatagttgctcaatatctagttgctaaacaagtgaatcaacaataaactttcattctgtatttcagcttagctgtttgtgtgcttatctattaacccctactaggcaggtcttattcatctgtaattcctgcagttccaggcatggtgcacctgcacagaacaggtgctcattaagtgtgtgttgaattaagttgagcaattaccaagcactagccacagattttgtgacttaaatccagttcatatcatctacaagaagcgtgcccaaagggtttgttaatttttctgagagatagtcccaatgtttcattagaacttaggcagcagctctgggaagaagtagccacacaaatagagctttgtgtgatgaggaaaacagggaggtgcaatcccagtcagagctgttagaagcaaccctttgccaggcctgagcatgcaaagccaagctctggggagagcaacagaagggtcgattggatccaagccaaaaggtcacagagtctgtcttggaggggaagggtacgccatgtgtcacagaaccgtgtagacaaactacagcaagtcagacacaccaagatttttgctcctgtttatttctgctacacttctacagaatcaaaccacttggttccttgactttggaattgtgtccatttgtttaaggtaatggactggggtcttccaccatgccaccctcaggacccgcatcctgaagtcctggtataggctgtgctataatgtggtctttttaataactggctcttttggaaggagttcaggtgcagcctgagttgtaccaatttcagggttataagtggggctagaacatgacacaatgtactaggaattattttacaaatttatcttaaaatcaaagctacttgcaaaaatggatttagctctgccctcaactgtttcctcaggctcaaatgtttaaatagaaataattcacaaaatatgtcactgtctgcttatattttatcctcatggcaatagaatgttactcaactccccaggtcactatcaattatttttaaactgctttgccttttactaaaaactctttagtatctggaagatttgtttcaaaagctgatcagaaaacaaacaattatgcatttcaaagatttattaaactaaaaaagaaaaagcttttaataaagaaacttactatgatgagtatttcgcttttacctttttagtgggttggtgcccataagtgatccttgtcattgcaaactatgccaggaaaccctccaaaattaaagcaagtgcagatttacataaaaacaaacaacagctgtcccagttcatctaagggtctgggccagcagcctgctgagaattcatcaagcccaattgagcagttcaaggcaaaagacatttaaaaaataaaagtacaagccccttgggaatattaagaaaagacaactccaaagattttcaaagatgtgcatccaaggctcaaaccattacaacagaccaaagtagtactctctaaaccagaggtgcaaaatggccacttatgaaagctactatgtgaaacatcaaaagtattcaggtctttccttcacacatgactggcttagagggacagaactttctttttcctctctctataaaattcccaaaccacagttttatgggctctattataccaattttcaaagcattggtcaactcaaaatgccattttctttggatggtttagatgattctcaatacatttttggtatattgattcaaataaatgttaccaaatcctcagtaaaaaatgtttccatggtgaaataagtatgatctcaaacaaatgaaatcttagagattcccaatgcatgtggagagctctgagtaaagaaagctgtttctaatccaacagttcccaaatatgtttgaccatggaatcttctttttactaaccccttttgatgttccaggggtgggaaacactgatttaaacatttctgtgacttcaaggtcaatattaaggtctatttcctattgagatcattcattcacctattaagtagacattttgttagttggcttgtacaggccaggctctctacctagacaccaaggcaaataaaaagaaagtgctaagatccagcaactctggtatctgtcaaggtaaagcaaaagacaaaaatgtacataaatatcagcattttcatgtgatacaggcttctgtgacccctccattgctgacagtatgtacagcaaaatttatatcccaagttgttcactaaatatttcctgtgcctttgtcgtgtcacttctgctatattgtttattacttaaaaacaaagctcatgccttatacttgtctagtattctctgtggtacctagcatgggattggacacacagtaggtcatccaatgaatactggttgattgactgattaaggaccaaactagataatcacttgagtccttttcagttttgcagttctaagagtctttttcaaatattggtacaatcttgtgcctacaaaattacggtgaaccacaaagtattgaataattcattagctctagtttaccaagagatgtcttaatgccacaaaagtcacaaaattaatgcatgctgccccaccaaatagacaagcaacagcaaactaaagcaatttactctctacttatagacacaacttaagtgttagaacttaaaatttagtgatttgaccttgtaatcagagaacagtcaagttctgattttacatatgggaatcctgggaatcaagtgaacatttagctattcattgtagaatttaatacagattagggttagccacaattggtaacacttggggagttgttaatttcttgctggcaatttcactgtaacttcctttcataaatttcagatttaaacttagtgttgtcatccagatcttatgcacatttatttgatttacatatgctgagtggctcctaattgtatgctcagtaaacagacagcacctctgatgctttatgtatttgagaattcttcagagccacagaaacttaattttgtaagtaaacaaggaagtgaatttagtgaggataaattacattaggctttattaagatatggcaggatttctcagcctctgtactactggcatattgggccagatgattctgtgctgtgggaggcagtcctgtgcattatagcaagtgtgcatcatccttagcctctacccactggatgccagtagcacccctcctacccccttaccaaaaatgtctctagacatcgccaaatgtcccttgtgggagaagtggcagaaattaaatttctgtggctctgaggaattctcaaatacataaagcatcagaggtgctgtctgtttactgagcatacatttaagagccactcagcatatgtaaatcaaataaatgtgcataagatctggatgacaactccaagtttaaatctgaaatttatgaagggaagagtgggagtgggagaagtctctcctggttgaaagccactgatgataaaagaactcctgctgactaaagtcagttttaagactaatgataaatgaattttcagttttgtggattatcagttagtatgttcccagagaatgaaaatcaatgctttttgtgctttggaactagataaatcttcttctttctagcctatgtggcttgggacaagttatctagcctctcagtctcaactcccttgtttgcccaaaatagaatacctactttgcatgtggcctcaagcgtaagtgagccatacactgaaaagcttctagtataatgcctggcaagtaccaggcatgtattaaatatctgtggtccccttcctcctcctcctcccactccgcctgttactcctcccatgacccctccccacaccccacaccccttgccccaatgcctgggataaacacaaccaatatatatgcttgctggattctttcctatttttctttccatagcacagataatcaaaagctgtcatatatacaaaccttatgtgagctttggagaacagaacagcctgagtcaacaataaataaaggagaatctgagttctcaacccttagcatttcatgcccaagaacttccaattacagggaatatgtccacacacattggacaaatttatcagtttattattctctgtccaacatggtaagactgtaacttgaccaaacatagggcctgctcacgggttgaccatgtttcttacccacacccccaagccatccaatagacctggtttctttctcagcaacactgactggagcaacactgattgcccctgaaaaggcccaggctcagcaccatggtgggaacagtaacatgaaaatgtatctggtatagtcctaaacctgaaggatttacagaaaggacacatggaagggcttatggaccttatgttcattataaaggcattataacaacattaccagccatttggaaattgggaaagagaggaaggagatcacccaaagttctagcactcaatacaactgttttcattttacatatttacttccaggcctggttcccacatacatgtgatttcccttggctgcaacaatttcatgcgtattctccttaatctcttttgcccccatactgcactagatcacagcattgtccttgattcttactgtcttcacagttttcatatttaatgactgcatagaaattcttgcagaagattttccacaaagcaactaattaattatccctttattgaggaacacttggtttctgactttgcaattataaatcatttagtagcaggaaaaaagtcatacacatagctttttccttctcaggacattttcttaggataaaacctcaaaagtgagattagtaggttaaaaacaatgggcatttctacagttttaagtataatattgtcaaattattttaaaatacatgattctgtttacaaaagctatccatagtttgctgagaatgatggttttcagcttcatctatgtccctgcaaaggaacatgaactcatccttttttatggctgcatagtattccatggtgtatatgtgccacattttctttatctagtctgtcattgatgttctcactcataagtgggagttgaacaaggaggacacatggacacagggaggggaacatcacacaccagggcctttcagggagtcaggagccaggggagggatagcattaggagaaatacctaatgtaggtgacaggttgatgggtgcagcaaaccaccatggcacgtgtatacctatgtaacaaaactgccattctgcacatgtaccccagaacttaaagtataataataattttaaaagctattcatagtttatttcaaaatatttataaaatatagaacggtataaagaataaaacaaaaatcacccataatctcctaattcaactactgctaatacatattatatttccttctagtctttattcccctgtgtctgtatttaatatatgcatctatttaaaagtagttttattctcatattaccaagtcctggcttgctaaataagcaggtactagactgccctaaggcagtcagatgagtaattctaaccagcataacaaaggggtcttattagagtgcaaagaatggctcaaaggctaccttattgcttcaggtatcccagcagccttctccacgtcattctgctaaagatcacctatcttccctccttgccaataggactgtctagcattcctgttaaatggagcctaactgatcacatacaggggctgcattctaaaatcaatgtctgaaaggcctttgaactataaccaaatttaccttttaaaaacacaaatctttaacaccaatatcatgcagaatgaaagttgaatgggaaccaactctgactgatgaatggtatattcaagtctcagcctcacatactcatttgtggaatgacactaagaatcacccttactctttaagtgcttcttcattttcactctttctttctctcactttgtcttctttcctcccttctttcctttcttctttacctccttcattgcttcctttttctctctttttatttttttctgattacatataattgaatctacacaagtttaatcctcttataacaaaaggccatgacagtcattcatactgaattgaacactgctcatgacagagaattccaccacaacaggcagcccattttttttagttgaatatcattagaaacctcatgttgaagtagcacttgcctctcttccagttctgcccattgtgtttcctgtaatgacggagagcagctcttctcagactccctgtgaaagccttcctgaagttctaacatccctacttcatccaacccatttttgttatggtgtggtttttcaggtgcctcaccttcctggtttgcctttaacacctgccactctgggaagagaatgactgtgggtcttgggcagagcctatagccttcatcagcctgttcactgaccaactgcacagcagtgacaggggcatggcagtggcacagaggaatagtggaagcacatccctgagacagcctctctgcagccccagctccagcagcctgcatcccagatttatggatggtacctggtaaagcaatgatgcaaactcaatgtgaaatccaagtacatcatcatctatctctgtatttggtttggggttttattaatgacagagaatgtgattaaacaaagtttatactgtaactaactccagctggatccaagcatcaatgggaaaccccaattcccctaatgttgtccttgtgtcctttctactcacaatttcttttccaaggcattttctctgaatctgataatggtgaggtcatacaatctcatttattttaagagacagtctggcacacccagcccagtggccctgcaatgaaggacttttgtgttggagatgctgtgagcctttggaaatggccttatcctaacctatgagatgaaatcactgtatcattctgccaaggcaatgttatcactgggtttgagcttatatttgaaatgtttccagcagaaatcatattctaatagactaaattgaaacatcagcatgaataatcttgtaggactaccagaagccagttcagtgaaatctgggttcttttggtagagttgttgcttattataaaatggctatgattacctattccttggactttttctctagggaaattcaggaatcacatctcaccagcacaagctgagtactgtaagtctgcttgtgatttgtgcagtgatttcttcctcctcaccagagctgaggttgagattatcttcaaagtcttttctcagtctctgtctctttctctggtctttctctcagcttcactctctcttgctgacattgctcctttgccctctggatctccctccacaccctccgttgctttctccactcccctctgttgttttcctgcttcccccacttctcatttactctttgctctcattctcttactcccctcctctctcaattgtatcccactatagctccaatgttctcttcctactatttcagttttcctctacaaatagcatcaggtttcctaagggtaagacaaatcccagctcacttagtttgttccagtgcctataggttttggggtggtctcattccatctgttcaggactcatccattcatgccaccacactcaacaagctccaagctgatggaaaatgacacagccatttctccctctgtccctgacctgggcttagccccaggatggctcctaacgggaatcagcagatccagcatcagggccagggccatcaatcatcggtaccaatattgtcagataccccatagtgcccagtggtgatagggccaaactgcataattaatggccatggtgtgcccttctgatgtgtctgcaaaatgtcactgttaccctgtaggtgacagccattgttcactgatgaagagccttcctctaatttgcaccatcatactcactattcttgagaagctaaaagaagatggtggctttatctcttttaaagagagtttctagaggcaatgggctggtgggctagagcaacttccagagttgcacccagtgcttgcaatgaaaaccaccaatttgctgtatacatagcaacataattcctaatattaagctatctactcaactcactatggcaaatcagaagatggttctttctcttctggctatgttttttgtagtgtgagatttttattattctagaaagagaccatttcacctgctaaaaatgaaagcaaatgtcttgcctaaaacaaacaaacaacataccactgatggtaactcaacctcttcttttttgccttgtgatttacttctgttatatgaagcactcactgctgagagcatgaagcctggacaattgaatcctgattgagcaactcacatgaattctgggaaataaagtcaacaattcacaaattgaatccacttctgaatgttcatccaccaaggactcttgacattcgatctctttgcatttctgctcaatgtttattgctttccactcgtccctcaaaccatagtctttgcttggtaatttcttgttttagaaagtgacaaacagaccaagcagagaaaacactgtatgttttggactaaaaatgaaatcattagggtaagtttctattcttgtcgactggaattttactctagttttgtttaagctcaacaaagatattatatttgatgctttcctgtaaatgtatgagatggtttgctattgcatgtccatgaatggaaatattaacagtttccatttggctccatcggcctctggcttggtattcacacccaaaaaaccaatcaacagagaatcacatcctcagcccagagtgaatagtttctgtcttgcctgcagtttttcttcacagtctcagaattaagagtaagtcttatccaaaatgcataaaattaaatagaatagccacattctatttctataaatttctcagtaaggaacaacttcacatttctaagcatctatctttcatggctacatttctatcagattagtgggtccttccaaaatctcttccttggtggttagattacttcatgaggagggagctccctcaagggtataaacaaagagaatgtcatgacagataagtagagaagccaagatattttacaaactcaaaagggtgtgctgattttttaaaagcaatcaggtatgttcaagcatagaagatgcacagaatcccacctatacattatccatatcatggaagcggaaatcaacactcagaacaaaacccagagggtggaactgttgctcccttgaattgatcagttttttgagcagtgcagagtagggttaaaaaggagtgaattgcagagcaagggacctgggctgttgtccatcatgccacccactcaacagtgtgaccttctacttccccacagcactactgaggtaaagtttccttatctgtcaaatgaagaggatactaacctcaaaagatttttaatgagtattttaaaaggaaacaaatatatataaagtgctagtatagtgtctggtacataatacataatacatgttattgagtattagtggtagtagttgtattcttttctaacccacagtttatgctaatggactaattaacatattttaacacacaatattatattacatttaatttcatacataaaatataggtcattctatccttattaatacttctattacagcctaaggtggaggccgaagaggactcttggggatttctatcctatccctgccttttcttcccacaaacccaaactcaaactcacaattttggcatacttaccctagtgacccagcagtcactaggagctccccactcagtctgaaccagtggctgaggaaaaaagaagctgtctaggcctcctcctcagacagctgtcctgccacttctcccgctggggtggaagggccaggagacagctatgctcagggcctggcctttaactcccagaactcctctcttacaagtgggagtcgttgctgccatggaattggactagccagaggggtgcctccttctggaggctgagaggagaggtcagaaagggtgttcccttcttttggaggcctaagcacaaagtccacttgtcttcagatgtgaagaaattgaaaaactcaacatggtctgcaaaaattgtgcacctacctttaatagattgcatcaggcaaatggaagagcctgcctcattttggaggacgaaggtacataattccttacctggttttaaaaatatggccaggcgcagtggctcacacctgtaatcccatcaatttgggaggccgaggtgggcggatcacctgaggtcagcagttcgagaccagcctggccaacatggtgaaacctcatctctactaaaaatacaaaaaaaaaaaaaaaattagccaagcatggtggtgcgctcctgtaatcccagctactcaggaggctgaggcaggagaattgcttgaacccaggaggtggaggttgcagtgaactgagatcatgccactgcactacagcctgggcaaaaactacatctcgaaaaaaaaatacttgtgtgtgtatgtgcacctatctatatataaatgttcttgtgaccattacaggtattgctcttttgagataattctaagatttatcaaggtctaaactgaaaaattttataaccaacattattggaaacacaaagctgacaaaagaaaagaaaaatctcaggagaaagaaaggaaaaaaacagccccagaatgagtgctagaaaatagtataatgaaatatatggggaatcaggaatattgatttctagaccccactctattcaccactcagttggaggttatatggacctacacaattcatttaactactccataagagactaaatgacctcaaggctcagctatcttctgcctctggtgattctactgatggcctatgaggaggtcttggagaacattggtcaaacttccatgactccaaagttctttaaccctttggaagtgatggggatgatgatgatggtgatgatggtggtgatcatgatgatgatgttagtaatagtaatggcagtgttgatggtggggatggtaatcatggcaatatgttggaagtggtaatgctggtggtggtggtaggatgttggtggtgaggaagtgttggggaggatggtgatgatgatgatgacggaggaggtggtagtggtgatggtgatggagaaagtagtggtgatggtgatggagaaagtagtggtgatgatggtgatggagaaagtagtggtgatgatggtgttggaggaggtgatggtagtgatggtaatggaagaagtggaggcagtggtggcggtaggggtggtggtggttgttgaagataatgctgccatgctctatggatctaaattctatacttgacctatctaaacgctgtgatagatttcagaagtgagcagagagggagagcacttaggtcctgggacttaatgaacacaggtgcacagagagcattggtactggtctctgcccataaacatcacatgtgccttttgaagtgattcttctgtttgggacagtgcaggcaaaacatacatgctcaggcagatacacagtgttctactggttgtgaaatttttggtgtttgtttgttggggttttttatttcttaaattttaatttatttttgttttttattcctccaaagtttgaagccttattttgagaatacaggaatcaggtctgtggaaagaaggaaaagttgaaatagctaaaaagaaagcagggctgaaagtggtggacacagatgaggggacacaatacagggagatgacaaaggggaaaagcatcctcacacacacgagaccaaactgtggtttaggcagagcttaaaagtaactgccaatgcacaaccacacaggataggtacgtggccctgggacaaaaggtgagagctggagccaggcctggtggctgcggcacagagggagctgtggcagtcagtctagcgcccaccttcccggggacaaaaggcgacactctctagaccagacaaggcagaaagagtccctggagggcctttgaggtgcagcttcctttacagacagaggcctgctgccagaaactcggctgattcacaaagaaagaagtgaaatgctaacaaatggtttccattatcaccgtgcagtctccaccctcattctgtatgtgtgctgtgtttttttctttctttttttcatcttttcatgggttgtaactaaacaatgaggtgattgccatcccagtggattgcacaacataaccagcggctgggctggagcatagccttctccaaggaaattctggacaagaaaaatgaacaagctggaagtaaggaggatgtctgttttgcacaacacctatgtacacttttagtgctcataaagaaggtggaacgagggtcttagattcttagttcctctgtggcgcacctgtcagcccaccagtgtggcactctccttcttaaataaaacactacatagccaaagtgaaagggaggctcacccagttatccaagaaggtgaattgggaccacttgttatttcccagtataacatgaaataatgatttacttgggttgaataaactggcgcagctgtgggaagagtcttcaattcctttcaataaacattcattaagtgcctacactgggacagccccacggatagaaatactcctaagacctcaagaagttaatccagcagatgcctaaacttgtcccaaatccctggataaccaagtataaatttgatcatgaggataccatccatgttgtattctccttgtgattcactttttctgcaaggcagcaattacttaagcaaagatgctattaactttacagtgcctggcaagttttcgtgatagctaaacattgcagcaccctgatgaacacagccatagctggagcagcttcctccctctgactgcgacatggctgaagaaaatggatatttcaaaaacaaacgtttcagtttgttactcagcatctttgttggcaaatgattgcagataatcgccccacagctgcaggctgagcgttctacaattgctcagttccactgagcatgtgcatggccagccattccaatcacgactgggacacaaagcggcgatttcttcctgccagagagggccagatgggggcatgggatgaacaggaggcatcactttctcttctgcacccagatctgccagtaactagctgcctgattctggccaaatgtctttaatgatattaataagaatagctgatatttatgtagcaccaactagatgccaggcactgtgctaaatgctcattcaatttaaccctctcaataatccaatatggagggtataacgttttgatttttgaaagaagatgttgaggggcagagaggttaagtctcttgctaaagattgagaagtgcggtgattgtgtggtgattgagaaggaaaaatgtctgccctcatctctggaatttctaattactcacaatgttctgggtctctagagacagatgctctctgtgggtctctcgttagctccagagtaaatttccccaatgcagactttttattttgttcatgttgtcattatcaaatcaaccttaaaagaagaaacactaaaagactgggaatattctgaaatataattatatgagaaccaagtgactttagaaaggacagcaggttttcatctctcctgacctttcctcctgagataatgaaagagctagatgaaactccttaacataagctcgaaaatccctgtcaaatagcccttcattagagttaaccaccctgatggcattccagcattccccataagtcatatgtgttactgcataataggagcccatgtgggactaagatagttaaagccatgcacaggaagtagctaaaacagcacaaagccccctgacaaacacactcatggaagtaaattcttcatttccagctcttcgcctcaggttacctaggatttgcatgtgctgcatgcctgggcaaagctgggctgagttatctctttcatgccttgagtcagattttctgggtgtgaagtcagcagacaagccaggaaatgtcactgcagaagagcaagggagctcaagacgcgatggcagctgtcactccagagtggtgtggagtgggacggtatctgatgtgtcctcagattcggtttcccttgggatgtgtttggtgctgactgcttgtgatccatgttttcttggatgcaggttggtagaggtgcagcaatttttgcagtgaaactgaagtccagctgctcaaacagaaatggcctcatctaatggacactttaatgagtaagggtggcattttactcgaatccttacattcaagtcccatgactcatcccttatccctccttaattgaaggatggactgcctgccttttttaaagcactagaatcccctgtgtcagttaagccagtatatttcctggtctttttcagggctatgaatccttaccttgtcttaatttctgaagttacatctgaatcgcattatagtcttatgtgttgtaacatttcttgacctattgcttagaaaacataccacacactgagaggaaaaggctagctcaagaagagccgaggacattcaatcctataaagcaaatagaataaagggcttggatctgagtgttaacattcactggcaccgttttgttttctttcacgtgttcaatcctaggtggtcattcaaggtctgcagtagcctggagactccataggtgctgttatgattacatgcgaaccttgactccataggtgctgttatgattatatgagaacctgagagtcattgttcccagtaccgctgtctgctattagtcctaagtatgggaacaacggatcagcgaaaggccaaaagcatcactgaaatagatttttgtgtgtgtggtttaaggattagccagttggaaccaaggagatgttttcttagggtctcagaaaagtttgaaaaattattggattgtttttggcactcaaatgtagattatagatgtattactagtattactaagctgaggggctatactacaaggactattatttagccctacattcttgcaaaaatattctgccctcaactctgtaacagaaggctgctgtgtgtttagatgtcttatcttccaccacattaatgttgttgtaattacccacactttgaaaacctccctggggtgtgggccgtcatacagctcatgaattcctccagtcaggtgaacatgcagattgtgtttcgccacacacaatagaaggccactctcattcatagcaagtgccctttgattctcaagctgaggtcagccaaccacaacaacttcttcctacctacagctgtctgactctctggggaagtgctagaaagggttttgtgggaaatttacccacaaatttcccaaagagccataggaccatttcttttttaagaaaattgccagggcactttagaattgtcagcattgaaacttttcatcaaaaagaatagcaatttcactgaaccttaacgtcttcctaagtccttggtaccagatgtattattttcctattggatgtgccaaaaccactagatagttaaacacatcaaatcatcttgaaatggccaaagttgatttttccctcaaaaaagagctccttctcagcaaacctcatattatatttcatactagaaaagatttcaaattccttttcctgttgtgcacagactcagggtaaggactaacagagagatgggagaattgaggggaatggctacagccaggaagatcacagtagtcacaccaacaactattcttatttcctcaacaacacatccttaatctaagacattcctagtgagtttccctactcacagagctctcctgggtggaaactaggagaaagggggctgtggctgccctggcatcttcaatgtagtgatcgatttggctattaccaaatagtgggttggcctatcattaagtccaaggaccatgtgctgaaatttttaacaccaaagatttagggacacttggccaaaaagacctctgggaccagtcctcccatgtgctccaaagcaatggctagtcccaagagcagcttgcactacatcaaagataccagggcagccgcagccccctttctcctagtttctgcccaggagagctctgtgagtagggaaactcactaggaatgccttggattaaggacatgttgttgagggtataagaatgattgttggtgtgattgctatgatcttcctggctgtaactattcccctgaatcccctctctctgttagtccttactcggagtctgtccacaatgggaaaaggaatttgaaatcttttctagtatggaatgcaaccatgaggtttgctgactaagagttcttttggggggaaaaaatcaactttggccattttgagatgatttgatgtgcttggtaatggccttaataatggtcaataatgggcattgccagagaacattttaagtggcatgcaaggagtaaaacaaacaaaaaccttccaattcacaaatgtcaattatatctagacaactgggcgtgggtcaggcaggagagacagggacaacattccccagagggtttgtcaactatattttcagaccttcttgtggcttataatgtgaccacacctgaactttatgttttctgagatgtattaatttattgataatctctcttaattactagcttatcaaaaacaattccaagcttcccattcaccctgtgcacctagggctcccagccctggctttatattgggatcacctagggagctttacaaattcctgatgcccaggcagcactccaggtcaatgaaatcagaatctctgaaggtgagacacaggcagcaggagtgtggaaagcttcccagaagattccaagctacaaccaaagttgagaaccactgctacagaggattcagggacagtagaaagggggagccagtgaggtagacagaatgtcccacaaattctgagtgtggagggattagggggatggtgattgacagagttatcaggtttcaatagctgtggctaaggcccattagtccttgaaaaacgatcagcagaggcacagtttccttaaactatgcattgattgaattttgaacagttcgccattaatcaagtttcatggctgaaattgatcaaaatattattgattaacctcaggggtcttaaaaagaaccctctctcctctagctctaccaggctcggggttggttggacatgggttctgagatgataagtcctaggagtatggtccagaagagggaagaagcccacaacataactttggctgttatatggaaagttacattcaagcaggtggtctacagcagtggactggctctgggttggcgctttgtctttgcactggatacttcaccccatgaggaggaacaaggtggaagccctaaagcaatggttcttaaacttatgtgactatcagaatcacctgcagagctggttaaaccgcagattgttgtgtttcattcccagtttctgattcagtaggtttgtggtaaaacccaagaatttgcatttctaacatgttctaagatattactaaaatactactatggaatcacactttgagaaccactgctttaaagcatgaaacccaggacaggacaagctctagaagaagtacatcagactttattaggattcctttgtgccctgtaagaaagaatagaacatgatccttaaatgagctgggatttatttccatgcatttatcaaaagtgtgagagctgatttctgtttaagtgattaccctatgaaaacagacagggttttaaaaatagatatgcatttgggttgtttgtcccaatgcctttgcattagaaatttgtaatatttaaattggatttaattttagagcctcaaccttcatcagcatgagactaaaaacaatgacaacaatatctataaaaatcatttagagtttcattattgtggacagagaatttctctctgcagtagtaaactgcttatatcaacacagaataagacaaggccaaaggcataggaaatgctggacagagtttcaaatatagcaatcagacatccagatgagattggcaggagaccctggccctggcatgcaccaaggtgacttggtccagaaattgcagatacagagccagggaatctattgtggttggcttatagtagacacccgaagaatgcagatcttcctaggaattgtggaattttttatttaaaccaaacttccctcttcttctagtcatccaaattggaggccatcctagcttgtagtggaatatccagaatatttcctgagaaagtcactattacttctctggttgctccactgattaaaagcggaggctttttgtgtcctataggaagacgttcagtgggcaggccccagaagtgggtactgcaagtctattagcacctcctgatgtgtaaggcccattctatactcctctcccctcccctactcctcttgcaatgcatggtggacctccacccagttcttgaactctggggcctttccttcccttcttccctaatgagctcctattcatccttaagaaccctgctcagatgttacctcctctatgaacatgtctctaactagtctggccagataaaaccaatttctccttccactgtgttttcatatcatgtcacatatacatcatacttatcacactgtactttaaatgtttatttatatgcatgccttttcctatctctagattacttgctttaggaagttaagtattatgtcttattctcctttgtgtccctagcacctaacacttaaaacagtggccagcacaggacctgcaagtttaagtgtttaattaatgaaataaatgaatcccaattttgggatgagagaaagcactacttaagcatctagtagcaatgcagcctggaaaacattcaaagtcacggaatctcagatgatcagagccaaaggggaccttagctgtcatctgtgccagcttcttatcctatagaggagaaagctcaaagatgaactgaatctccttctatacaggagaaagctcagagtgaactgaatcagaatgcaggtgtgtgggttccagcctgcaacctttcaggtttagccaaacacccagatgaagggtttatggactagacgaaaccatcttcccatgagtaatgggaccagataatgcccacctcttaccctggggacacgccattctccctctcccatgctaactccaaccctgggagagcatgaaaatgttctttgtcacagaatgtaaccttttaaagagtgtctgagtatgcattttcatcactagccttcaaccccaattgagtattgaaaggtttttctggtactttctggagcaagaagactattttgagcaggatgggaaaggaagaagaatggagacatcccagggcttaatttcatgatttctagtaacttgaagatcactttagaggtccttgctacctccccattctccaactcctcttcgtggttggaatttggggagcgatggtggcttttctgacatttgctttcatagcacaagctgagagggagttggatgaagatatgtggtggggatccatgctggaaaaagatatcacagggagaagatttttttgaagttgaagagagaatacggacaggaaagttaagatgtcattctagaactttattgggagggcatctccaccctacaacaaattctgtgatggacataatcattcattcatttatccgtaaatatcaccctcttgttcaaagccctccactgccttcctaatatcctgaggataaaaccatagctccttgctgtgtctctgtagacctggctcttcctggctctccagctcattttctaggtctcgttacttcatgctcagaacctttgtcttgtttctagctcagggcctttgcacttgttcttgctgcctagaatgttctctccctcattccttctcatcctccagatctcaacttgaaggccatctcctcagagctcctcgctgagcgtcctgtctacagtggcccctcgatacatcctgcagttgctctctatcatcagaccctgtaattgccttcatggcatataaagaatctggagatatcttgcttatttacacaacactgtaagctccatgagagcagaggccttgtttgtcttgtttactgctgctcagcaccaaaaacagtgcctggcacatagtcggtgcccagaaaatattgtgaatgaatgatgtgcctacatagattacattatagaagtgagaggagaatagaaaacttccattgtttctagaaactacagcctaaaattgattttttaaaattgtatcagctccatagcttccaatcctaaaatctgcctttcagtgtggtactctgagattcctgtctgattctgtgagagctccacattctctctcaaatggtcagtctgtcttatttgtcaccattactcatctgcatttttatcaaagcaccaacttgctctgaattgtcagggattttgcgtctgtataaggtattttaggctggttcagagttggatctgttatgtctgcatgtgtaatgtactgaacaatttctattttgatgccagattagggatctgctggggcaagactttggcatgtgtctagaaacacctgcactaggtgcaagatcagccatggactgtgtccaggctgaaaccaaaaggtatggcgcaagagtgagaggcaggtgccaccacaggaccatgagaggccaagctccggtaaattttggtagccaaattctagctccttcctgggccttgatgctggtaaaatcccagaactcaaggaaatggaatttgtcctattggcacatgcctccccactgtgtagggcacagggaatgtggtgaggtacagtctaatgccagctctccccctccacagagttttggccagtggtcgtgcagtccaaggggctggatggcatgctggacccaagctcagctcagcgtccggacccaataacagttttaccaagggagcagctttctatcctggccacactgaggtaagtgcctaagggaccttggccttgccaaggtcctccctctgcagctgccagaagcaggagtcccaagtgacaggacctgagagggcaagtcagaaccaactgctgagcagcaggggcctagagaagctttcagtggtgcagcaaatgcagctcccctagcccactcaggaaaggaaatcttttgtgcatgcaggttggccccatgggccccagggacatatcaggagtctgagctgcatcaagggtctaaagttgccgaacacaggacctcgaatagacagcgtcagtcagaccctccacacaactctctggtccgactgagcagggaacttgcaaaatggaaggttcacagccactctttgtgcccttcaccagtggagtagaggggtagggaagagttccaaatctgcacacaggaggtgtggctccgagttccacttctgtttgctgtgtacctgtgatgcaattacttaatcttactacatctctggtttctcattgttaaaataggaataatatggccaacctcccaggtttgtgtaatggttaattagaaaattatacccaataaataataattactattatctcagctcattcatgtcaaggtatgtcttttagaattcagatcagtagatttggttcccattaatgtatccagcacagctgccctccgagagcccagtgaccccacaggcgctggtacctgctagtgttttctggttgcatatttctatcatgggcatttcaagtgcttttagatcaagtctacacggtgcccagaaacctaacaaagcagatatgaaaacaattcaatatctaaatattccctaatatctggatttatggcatcaggaaggtaaaacttacaatctgttgaatggaattttcatttcgatgttgggggatgagtatactcaccccaccacctatcagttacagtgtgcatacggcttcaggcctctctcctctaaaagatagcaaagctgagctcaagtcaggtgttcacggactggccctgccactcactggctgcaaaagcccaagtcacttagcctctccaaggctcatttttgtcttctacaaagttaaagaattaggctagactcgtggctctcaaaatatggtccccagaccaacagcatcagcatcatctggaaacttactagaaatgtagattcttagtgtcctcctaccagacctacagaatcgagcattctggagatggggcccagcagtctatagtgtaacaaactctccaggtgattctgatgccctgaagtttgagagcctctggacttgaatctctgatgtaccttctaggccatgcctcctcccaataaatcctgtcctaacagaagctctggattttactctgtcgatgcctctctctgttcagcccaccccaggacacctctgaagtaccttgctggagaaatgaggagccacagaattcctcccacactccacaccagctccaacccccaagagtattcgagcctttacaactgaagacagcagccagttaacatttagagtgaaggccaagcgtaaaacaagaaatgacccttggcccactctcagaatgtggcgaatgagatggaggaggaggaggctggatttccttggccacaagaatttcctctctcaccaactgttagtgaccctggttcacgtatcccatctctagcccaagaatcactcgtggctcttggcatggctgtctctaagacaggaattctctcactcccttctacaacacatctccccaggcatggttgccaagcctcccagtgccatcagccctcctaaccacaaatatttgggccagttgcttagctctgttcagcagctccatcacctattcaggtgaggccagaatctttgaagatcattcacctcgtgcgagaaatttatcctattattggagtgtgtgaaccattggaaatccacagaatgtatcgctggttcagaagagggcaagagggcagggcagcccatcagtggctggttgtaaaggcatcccaatgggctgccccactcttagtcatggatcttccattctaggtaggagtaggacaattaaagagcattctcatattaaatagaacatgttcgttcatgtgagcccctaactgcatcctcctcagctgatcattcagcttgcagagctctgcttaataaagccagacagaaagctgtcatctgttcaggagaaaggcttcaaagggtgtttttaaaaaataaataaataaaacttctcccctggttcacatcaaccaaaaataaaaagaatgttcttttctaaatggtgcattatatcactagaatagaaaatgcactcaatttttcttttatctactgatcacttttaagagagtttttttttaaacttaaaagtttataggaacacactctcatgagtaaattaaatatttttttaaaaaaactttaaacctaaaatctaaatgagagatatatttgagacattttcaagtcttaatgaaacattctgcctgtgatacaaatctccattgtgattaaatgtgataccatttggtatcttgactgtgagtggaaaagtagtgttagagtgtaggaactttgtgaagtcagttcagtcaaaccagcagatgcaaggcagggtagaaaacttcataattacctgaaatgaaagaatataatggttggaagatacctttaacatcatcatgcagatggagaattaaggaacactggaggcaggagacttgtctacatactcacagtttcttagaggaggagttacctaggagttctaggtcacctgggggcaacaaagatgagtaggacactttgctgcctacagggagtttgtcctctagaagggaggataaaagaatacaacagccctaagagaatataaagggaaggctttaagagatagagaaggggcagggcgtggtggcttacgcctataatcccaacactttgggaggccgagggggcggatcacgagatcagagatcaagaccatcctggccaacatggtgaaaccccgcctctgcaaaaaatagaaaaattagccaggcgtggcggcgtgtgcctgtagtcccagctactcaggaggctgaggcaggagacttgtttgaacccaggaggcaaaggctgcagtgagccgagatcaagccactgcacttcagcctgggtgacagagcgagactccatctcaaaaaaaaaaaaaaaaaaaaaaaaaaagatgagagaaggtagtttgtctcagaattagaaaaagctccccaggggaagcagcattgaagttgttgaaggacaacaggaaggattccaccagcagaggtggagagcagaaaaggccctgagagggtaggggagcatacctggaagggaagagtctgaaaaagggcagtggtggggaagctcaagcaggaactgcccccaggagttttgtgcactcggaatgcaaactatgtgaggggagtagaaggaggcaggatcccattgccaggcagagcagtccctactggcttacagacaagggacttggcaccagctcctttgagcagggtgatatgatcagagcaggctttaagaagctaaatggggtggccagggataggaggaattggaagaagagagatgagggtccaggatatcaggtgggagactgttcccatgacctgaactaggggcccagagatgagaatggaagataaaatacagtttcaagataatgctaccaaaccagaaccaaaagggctggatggaggtcagggaggaaaaagcagagggataagcagaggtatggagctagtggatgaatgaatgatggttccagtaacagaaaaaggaaactgtgaagaagcgtgtttagggagatgaggagagaggatcaagagagatggtagctgtgaaactatcatcaaatggtccaaaatggggctgttgctattgtatgcagagaaggaagatggggagaagatgatcctaattatgattatgagtatgaagatttttgttttggatgtcttgcatttaaaatgccagtatctatggagaattgccctcaggaagcaggagggcagaactagcttcaaaagactagttgattcgagatccaggtatgggagtcaattgcacagaaatttcgatgggctccttagaagaggaggagcccaccaaaggagagaccaagaatgaagtgggaacctctggtaatggggaatagggagaggtatgtcccttatgtccatcgaaacccttttatttagttaatttcattttcctcttgaaattctagcaagtgttactaatttggatataagggaatgaatttcagttttctttcttctcctttaatgtatctgataagagatattatgtaccgagaagaacaaagaagtgaaacatgaaaaggagcaaaagtaaaaggtttagatttgctgccaactgaatattcagtccgctaagagttgaccggacatttatctgcaagaccattagccaacagatctggtaatggtcaaaaccccagatatgccattgcctcctttgcatggtcagctggagaactggagcaaacagaaacattcttcaaagaaaccaaagagaaaagaatttggtgatttccttcttggtatctcaccaaagagctgtctatttccagctgaataaaagcacagtatggaggagaagaatgtgttgccttaaaacagattagaaaagcagtgtgtagccatatgcacaaaggccaaaagaaaccacacactgtgatggaaagaaggcagatggtgagcttctcttgccactctcattcattctttctttcattcattctccttaaattttttgagtacctactacatgccagacacggcaactggccctggaaatattgaaatgcaaattgtgcagcttgcaaagccctctcagggagacagacaagttaatgattatccacaaccctaggagaggtgatagggttatgcacaaactgctgtggaatacaagggatggagtgcccagatacacaagtggatgagacacggctccaccctcgagtatctcacagtcagggtgagacaataaaaatggctttgaaggaggtctgagagaggtaaaaccagcagtagaaagcacaaaagacaaagtccttgaccacaaggagacagaaataactcatgatttacacaaattttgtgagaacctacttcatcctaacaactactctgggagatagtgttttttgcccacctccgatcaatgggaacgctaaggctctgggaaattaaatgggtttcttctgctaacaagtagtggagtaggaatccaaacacgattttctaacccccagacccaatgcagagttcttgtcattacactgatttagtaggagagaacacacacactcacactcacatgaacacacacatatgcacatacaattacgctattctgaagtgcagaatggcaaaagatcatttttgattggagtgatctgagaaggcttcgaggactaggtcgtatctgtgtggaaacggagcagaatgacccataagagtgggaaggagagatgggagaaaggatagaattggaagtttgtagagcactcttacaagagatatttctgatcctaccaggaagatctatggaagctttacagaggagctgacgtttgctacacatctacaagtatgcataggagctccgcggaggccagtgagaggccctccaggagcagaactaattccacaattacttgaccaagttgggggattatttgtggggtaactgcagtgcagtatggagtcctcttggggacagttagagccataccatttgatctatagtcacataagaacaaacaataaaaagaaaagacatgcttaagagtgaaagagaaagggagggagaaaagaaggaagggtggatggaaggacactagcttagtaaggggtcaactttggattctatttctggttcagttttcatttgtgacttcagtgctttagtgttagttcattttctgtgaatcagtttccttatatgtgaaataaatatgataaatcctaattgaactcacagactcatgagaagatagaagtgaacacattttaaaaacatcacacaaagaggaactattatgtggtccacatttatatatgtggggtagcgtctgaagaggtgcctggactaagatggtcccagagccacaaggtttttgccaaacatgacgctttgtgaattcataacaagggctccgagtcaccagatcttagagctgacccagtgcactgtctgaaagggggtacccagttctgaggcttcaagacatgtccccagcagatcttccccgtgccttcccagaggattcaaaactgttgagcaggacggcaccatcacatcaaggcacaagtgccagggagagatgttaaactctccccaccggcctccctggtacacacatggacacttaccacctccctcagccgccttaagcttcagagaactcaaaggactctgtaagtgatgtctccaagctcatatcgaactactgggcaaaatttcaggggctctgtcacttcctggagaagctcggatggggtgaccacacatccatactgcctgagtcagccccgggttacgcctgttgtcccggtataaccattgctagcacaccctttccctctcagaagtgccccggtttgaatgaaacctcttcgtgatccccttgggaggtcaactctgagggacccagaaactgccttttgactgcatttagtactccatgaagtcaccctcatttctttttcattccaggtgcatagcgtaatgtccatgttgttctacactctgatcacagcttttctgatcggcatacaggcggaaccacactcagagagcaatgtccctgcaggacacaccatcccccaagcccactggactaaacttcagcattcccttgacactgcccttcgcagagcccgcagcgccccggcagcggcgatagctgcacgcgtggcggggcagacccgcaacattactgtggaccccaggctgtttaaaaagcggcgactccgttcaccccgtgtgctgtttagcacccagcctccccgtgaagctgcagacactcaggatctggacttcgaggtcggtggtgctgcccccttcaacaggactcacaggagcaagcggtcatcatcccatcccatcttccacaggggcgaattctcggtgtgtgacagtgtcagcgtgtgggttggggataagaccaccgccacagacatcaagggcaaggaggtgatggtgttgggagaggtgaacattaacaacagtgtattcaaacagtacttttttgagaccaagtgccgggacccaaatcccgttgacagcgggtgccggggcattgactcaaagcactggaactcatattgtaccacgactcacacctttgtcaaggcgctgaccatggatggcaagcaggctgcctggcggtttatccggatagatacggcctgtgtgtgtgtgctcagcaggaaggctgtgagaagagcctgacctgccgacacgctccctccccctgccccttctacactctcctgggcccctccctacctcaacctgtaaattattttaaattataaggactgcatggtaatttatagtttatacagttttaaagaatcattatttattaaatttttggaagcatcctgtgtgctgatgctggttattttttttgagtaaaatcatctgcaagtctgaggaagatgcagggggaattgtctgaagcaccccctggctccttctaaggcccacctgtaacccttaccccacccccagccagtgctgcaacttcaggaaaggctaactggtttcagatattagcctaagccaggcatgattagcaaaggaagcctgctggattgcaactttgttctacattccagagccaaagctacctaatcattggattacctgcccacggcctggaagcatgggccctggtctcctcccttggagaagttagtggagcctcatcaggaggcagatcaccactgggcatggggctgccctggcctcagaggcacagtctcagtcctgggggcactcgatagacaggaagaggcttgtaccaaagatctgtgagctgctcatttgtagagggagatgtgctgtctggaagagttgtaacagagtaatctcacgaggcctgtcaaagtagatctggtttcatgttcagctggccttagtactcgttttatccctcagcagcctcctgcagaaagacttcattaccccaagaaaaca

SEQ ID NO: 79 - DNA, 1350 bp, Homo sapiens
cacttggccttacactccgctcggctcaccatgtgtcactctcgcagctgccacccgaccatgaccatcctgcaggccccgaccccggccccctccaccatcccgggaccccggcggggctccggtcctgagatcttcaccttcgaccctctcccggagcccgcagcggcccctgccgggcgccccagcgcctctcgcgggcaccgaaagcgcagccgcagggttctctaccctcgagtggtgagtatcgccgaagtgggcattcgcggggtgcgctgccctggagtcactggggaacgacccgactccagaggcctcgacctgacctgtctcctgttttgtctccccttaggtccggcgccagctgccagtcgaggaaccgaacccagccaaaaggcttctctttctgctgctcaccatcgtcttctgccagatcctgatggctgaagagggtgtgccggcgcccctgcctccagaggacgcccctaacgccgcatccctggcgcccacccctgtgtccgccgtcctcgagccctttaatctgacttcggagccctcggactacgctctggacctcagcactttcctccagcaacacccggccgccttctaactgtgactccccgcactccccaaaaagaatccgaaaaaccacaaagaaacaccaggcgtacctggtgcgcgagagcgtatccccaactgggacttccgaggcaacttgaactcagaacactacagcggagacgccacccggtgcttgaggcgggaccgaggcgcacagagaccgaggcgcatagagaccgaggcacagcccagctggggctaggcccggtgggaaggagagcgtcgttaatttatttcttattgctcctaattaatatttatatgtatttatgtacgtcctcctaggtgatggagatgtgtacgtaatatttattttaacttatgcaagggtgtgagatgttccccctgctgtaaatgcaggtctcttggtatttattgagctttgtgggactggtggaagcaggacacctggaactgcggcaaagtaggagaagaaatggggaggactcgggtgggggaggacgtcccggctgggatgaagtctggtggtgggtcgtaagtttaggaggtgactgcatcctccagcatctcaactccgtctgtctactgtgtgagacttcggcggaccattaggaatgagatccgtgagatccttccatcttcttgaagtcgcctttagggtggctgcgaggtagagggttgggggttggtgggctgtcacggagcgactgtcgagatcgcctagtatgttctgtgaacacaaataaaattgatttactgtctgca

SEQ ID NO: 80 - DNA, 10305 bp, Homo sapiens
agtgagcattctcagcacattgcctcaacagcttcaaggtgagccagctcaagactttgctctccaccaggcagaagatgacagactgtgaatttggatatatttacaggctggctcaggactatctgcagtgcgtcctacagataccacaacctggatcaggtccaagcaaaacgtccagagtgctacaaaatgttgcgttctcagtccaaaaagaagtggaaaagaatctgaagtcatgcttggacaatgttaatgttgtgtccgtagacactgccagaacactattcaaccaagtgatggaaaaggagtttgaagacggcatcattaactggggaagaattgtaaccatatttgcatttgaaggtattctcatcaagaaacttctacgacagcaaattgccccggatgtggatacctataaggagatttcatattttgttgcggagttcataatgaataacacaggagaatggataaggcaaaacggaggctgggtatgtgtgatggaaaaattcttcattgttctttcctgtgaaatagaaattgagaatttccttgctagttaaaacaacaacaaaacactttacctaagaatactattttccttgggtggtttgttttaatttttaaaataaaaatatactttctggcttatttccaatgaatccttgaacttgaactttatagttggaaagcacttatgttttcagtttttattcttaacagtataaattacagtagtgagctttggggattaataaagcacctctctcatgcagcttcacaatcagctgtgcacacactctaatctagtacttagcttttgctagggttgtcatgacagtacagacagtacagaaatttctacaatcagcacagaaagttgctatcagatgctgttatttttaggtatttatgggttgcaaaagacaggtgtaaatttttgtaagttcatcgcttacaaattggtgtttttcagtttactaatacataataaatagtaacatatattaatatatagcaaattacattacatataatatataacacattattactaataataaattccgggctgttaaagtttgttgattaaaacataatatactgtatgaccagcaagaacctttattcaagaattttcaaataaaaatttactttattatcagtgcctaaaaaagccaagactatgtagaggcctgtgttgaaactcatgttggtaaaaagcctgacacagctggatgtatatggtttcctttatattccaatatacttaataattatttttttaaagcacttaagtgttcattgatcctctctccaacggccttcacctctcccaagaggtaaccactgttatcaattattttgcatgcaaaacatgcctactgaatctatccatagaaaataaacaatacttctttgtaaaacattttttgtaaaaaaagttttatataaaatgtatatgtatgcttatgtatatgttttacataacatatatgttataccatataacacataccttttttacatatacacatagattttttatgtatacatataaattttgcatacatatttttacatgtgtatatgtaaaaatagtacatggtactaatgctgccacttatttttttacccagaattatttaaaatagtattattaagagtgctgtgtatattctgttatatgtaagtgctgtagagtacctggccatttctagctgatagctgtttaggttatttcgagtttgctgtcacacacaatgcttcattgaatatcattttacgtaaatcttcccttgtgcgtgtgtgtagttttctagggtggatgttgggttgtagatgctgggtcatggtgtacatacattttttaatttgttaggtccttgccctccaaagtggctctaccaagttacactcccatcagcagctcgttaggatatgccccgggattctcctaccccagctgactaacagtaggttgctgcaattcatcataattttcttaatttgttgggctaaaaatatagagtttatcttgtttcaattcttgttttcttgatttctagtaaggttaattttttttttacattttgagcatcttttcatatattaactgatcatttgtaaatgcagggaattgtctgtttacaccctttgcccattttccttttattttgtctttttcttattgatttgtaggaattctttgaatattctggatacaaattattatttttattattgtttaaattttttgagacagagttttcattcttgttgcccaggctggagtgcagtggtgtgatctcagctcactgcaacctctgcctcctggtttcgagcaattctcctgcctcatcctcccaagtagctgggattacaggcatgtgccaccacacccagctaattttgtatttttagtagagacagggtttcaccatgttagtcaggctggtctcgaactcctgacctcgggtgatcctccccctttggcctcccaaagtgatgggatcacaggcgtgagccatgcacccaaattatttttatgtatgtggcagatatcttttagtttgctgattaacgctaatgatgtctttggtcattataaatgtttaaaagtttgttgcaatcaaatttattgatcttttacttgatgcctttttcattttgtttaaggccttcctgcatgatagagcttactgcagctactcccctttctcaatcaccttcttcctggaacttagttctttctaactgagcctgactgaggctgggcgaatcatgtgaaatgttttgtcatgttttcttccggttggctgtgggaggctatacttgaggactggtggaaattcagctgcactgtgtagatttcaggtgaaggcaaatgttctctggcacagaggaccacagatgagcctgcagagaaatactctactagtttgcaggctctatttgggtttggattgtatttccaacgcttagcataatacttggagcacacagacagtgaataaatgttagttaaaaatttaacttctccacaataaattttgtgagctcctggaactcactgttagcaagaggtgtggaattgtctctgagaatttctagtagtaccctcatctttcaagggtggtacagatgtaaacatgagtgtggccggatgaacctctcccgagtgtagatacaaatacacacattgcctgcacgtgcacacactcagcctttctaaagtttccaagctcttttttttttttaaaaaaaacacctgaatagttcaagttgtagacatgaaataaatactcttggaaatgtcatttcaaagcaatctccatgccgctttcccagctcagatgagacattgattctgtcaacgataggcagtgcttttttgagtcagtgcaaactggcatggaaaactgttatcatcttttcatagtgatgttgacaaatctgcttaaatgaatgaatttactcttgaatgattcatttcaggggaaatggcacaatcacacacctatgctggtagagtcagtggcccacaagaagaggtaagagtagagaaggcacttacagctttatcaagatgtgagcacatacaatctataatttaattaaatgttaaaattgcccagagactttatgaaaactttgaatcaacaatgcggtatgtgccgggtgcagtggctcatgcctgtaatcccagcgctttgggaggctgaggtgggtggattacctgaggtcaggagttcaagagcagcctagctaagatggtaaagccctgtctctactgaaaatacaaaattagcagggcctggtggcggatgcctataatcccagctacttaggaggctaaggcaggagaatcacttgaacctgggaggcggaggttgcagtgagccgggattgtgccactccagcctgggcaacagagtgactccatctcaaaaaaaaaaaaaaaaaaaagcggtatgtgagcacagcatagatgttcagagcaccaactcagaatcagacagacctggcttcatttctgggctcgagtgcttactacctgtgtgaattgtacaagttgcttaacttccctacgtcttgtttcctcatctgtaaaaacaggaaaatattgcaacctatgtcctgggactggtataaggatcaaattagttaatatatgcaaagcacttgaaacaattcctgaaaatgagtactcaatacaagtttaggatttttgtttaccatgtaaaacagatcccctaatgggaagaaacgagactggtctatcagtaataggactcataatctctttcgttattctctttctcctttttgtcagttgtctttccttccttcctgccttcctgccttcctgctttcctgccttcctgccttcttttgtttgtggcttctcatctctctttttgtcctcttccatatttaccatggtttcctcctgtccgctctcctaattggaagtgctgagaggatgtgctctcacaagatctgacaggagagctagtgccatttggctgcctccagcattcataaggaaaggatggttcttaaaaaccattagaatgttcatgagatgaaactcatgtctcttctcttgggatcacccttccttttgaaccagatgggtcttcttacttcctcccccttcaatgaagcattctcctctgcatatgctgggggagtagaaagaatgcttggcactcagctccacatgggagaaattgtgtctacttaatgcatcactgtgtacctcatgcctagcatagaaggtaacaatatttgctgatgggatgattcaacgaaccaacactgaaactgaatatttgaactctggttttctcactcactagaggtataaccttgggtaaattactgaggtactctgagactcagattccttatataatgtatataataatatgacatgacatatgataatttattatatatgtaatatttaatgaaaacaatcttacctacctttaaaggaaagctaaaggattataaaacactttttgtaaaacagtgctttccaagctgtcaaatactgtgcaactacgagagtcgtgggaaattccaggaagtttagataggtaattctttgcccttctgaagtaggatgtacagtcagagttggtgctttcccagtaaccaccattttaaaggttgggtcatacagttaggtcaagaggttttttttcttttttttttttttctttgtcatcctcttactctaaataatagtccggtcaatttgaggccaaataaatgggcacacagagacatgtatagatgattaactaagtgttcactttggcaaaggcatttccaaaaggtataaagatctagcagcaaggtgatactatctcaagtgttcatatatatcctttgattaaataagttttggggcaaaattttctatgtcttttgaatttttacttgagactctaaaatcatttagtgaaaaataaaagaccctcaagtcaggcagaaatgtatgacacttaagtgctagttctctaaccttgggagtcagcctggactcctgtctctcatagcccacatccatccatcagcaaatccccctggctgcccctttgaaatgctgtaataccctgtgcatctaggccgccttcctctctcacttgactctgtcagtagcctcctgccagactccatggttccatcctttatctgctagaatttgttttccacatagcccccacagcgatatttttaaaacttgaggggccgggcgcattggctcaagtctgtattcccagcactttgggaggccgaggcgggcggatcacgaggtcaggagatcgagaccatcctggctaacacagtgaaaccccgtctctactaaaaatacaaaaaattagctgggcgtggtggcgcatgcctgtaatcccagctacttggtaggctgaggcaggagaattgcttgaacccaggaggcggaggttgcagtgaggtgagatcgtgccactgcactccagcctgggtaacagagtgagactctgtctcaaaaaaataaaataaaataaaaacttgaattagatcatgtcttggcctaatcataaccctccaagctgcccttttaccctgggaacaaaagcacaaaatcctgactgtggtcctcaaagccctacatgacctagcctctaaccgcctctcaaatctcatctgtgaatccctccgtgctctcatagctccagcctccttggataagctaagcacattccaccctcaaggcctttgcacttgctgctccctctgcctggaataattttccgccagaagtttgcctggcttacttcttccctttgctcaggcctctgttccaaggttgcctcctcagagaagtcttccttgatcaccccaactgagaaagtactactgccactctctgtctccctacccaactttattgccttcataatagttttcatgactggacatcccattgcatatttacttgcttatctgtttattgtctgtgtctgccgtgaaaatgtaagcttagtgagggcagggatcctgtatgctttcttcaccactgtgtttccagtgctttaaatggtacctggcatgtggccaatgctcaatgaatatttcctgaatgaataaatgaataataatgtttagagaagtgggagtaacataatggtgtttgcgtgtattttgtttgtttgtttgtttttttgaaacagggtcttgctgtcacccaggctggagtgcagtggcgcaatcttggctaactgcagcctcgacctccagggctcaagcaatcctcccatctcagcctcccaaagtgctaggattacaggcttgagtcactgcgcccggctgcctgtatctttaaaaattctgagattttgattttctttggactattgatactgtatattattttatgctttaggttttcttgtaaccaaggtagctgaatttaacaaactatcaccattcccagaaataataaggcctgaactattcttatttactactacattactgataggatattgaatccttgtttgtatatttatttttatataatggttttaagatacaaatagcatcattaaagaaaatatatttgaaaataacatttttgaaaggaagaaaagtcactcccatcaccctaacatatccacatgcagacattgtatgcaattataattagggtgcacaagagttttttcctgtgacatattgtagatattttcaacactgtctcacatatttcatgttaacattaggcattaatttctaatgtctacagaatatttcattaatttgttatatcataatttacttaaccaattcccaattgttagacaatttggttttttcgagttttccccttttagatataatgcttcaatactgaagcatgggtatgcttttctggtgccccctaccctccaatattttagaagactgcctcatgataaatttctaacactggaatgactggttcataagatgtgtgtataattacaatactctagcatattggaaaacatattttctttccaaaagtattatatcaatggaacaatgtcacaacaaacttaatgatgtgggtggtactattaataattttgaggtttgctaggcataaaataacaaagccaatttaataggtctaaaaaacaataagactgtgttaaaagtacatttttaactgctattagtgtttttcccatatacttgttaataatttatatttctctctttaatggtctttcccttttaaactattaagggcctgaggattttctgttacatttgaatgaactctttcatgctatatgtaaatattttcctagtctattgttcttttaattttaatttttcatagtttaaaaaaattttaggctaggcacggtggctcatgcctgtaaccccagcactttgggaggccgaggcgggtggatcatgaggtcaagagatcgagactatcctggccaacatggtgaaacccggtttctactaaaaatacaaaaattagctgggtgtggtggcgtgtgcctgtatagtcctagctacttgggaggctgaggcagaggcagaagaatcgcttgaacacaggaggcagaggttgcggccagctgagatcgcgccattgcactccagcctgggtggcagagcaagactttgactcaaaaaataataataataaattttaatctctttctggctgaattcatcatttttttctttgttcactgtcctttcgacattgatgtatataaggtgatacattatgactgctcaatgataatagacaatgatcgttgtcataataataaaaatcatgctgggtgcggtggctcacacctgtaatcccagcactttgtgaggccgaggtgagtggatcatgaggtcaggagttcaagaccagcctggccaacatagtgaaaccccgtctctactaaaaatacaaaaattagccgggcatggtggtgcgcgtctgtagtcccagctactcaggaggctgaggcaggagaattgcttgaacccgggaggcagaggctgcagtgagctgagatcgcgccactgcactccagcctgggcaatagagcaagactccatctcaaataataataataataatttcagagggcctcattatacttgcgaaacatggggtttatgaaaattctaggaaggggagtaatgaagtggatacctcttgagagtgtataggaaactatgagtatgtactggcaggagggaaagaggaagaagagagagggccagtttccttcctctgtcaaggcatgacagcatgtctcagagcacgatgtacacttaacacgtaggcagaaaatggctttcttaggcagtctttcaaatgaaatccccctggctggtggtattcatctgctttgccagtgatgctcataaaatgattccaaggcaccgcagagctctcgagtcactcccaactatcaaagagttatgctcggtttacatttcaatattagttacactgggctctgagctacttgcaggcatttgtaaccccaaggttctgaaacctgtaaggtgaagacgtaaatgtttgccagatgaccatttgaaaaaattattttaacaattttctaattcttttggcacttgtttggaaatgtatggagtggaaagaagtagggtgttcacattctcatccaagtccaggcaccaacgggttggctaatcttagataacttatttttctgggcctcgatttcctcatttgttaaaataatggagggcttcaggctagatgatctcagagatagtttttggtgaggattatttgactacagattgtaaattaactaaataaaatgtccagttaattgggttatcctatatttttaaaactatgtctgatcacaaagagagtagattataaaataaactatcaaccttttcatagcttcaaaggtattagtttaatttggatttactgtgagttctcatgattttcaatacaatgcagtttacagtataatataattcatattacaaatataagtgcattgaaatcaatgttggacaattgaacaagaacgagaaaaaaaaaggctttctatcctctagagctgtgcttgctgtccactatggaagtgaaatgtggctagtctgaattaagatgtactgttaagtactaaatactcattggatttcgaaggtttgttatgaaaaaagaatatctcattaatgattttatactgattacatattaaaataaaaataactctaaaactatcctaaaagttagttttatctatttttttactttgtaaaatatggctacaaaaaaatttaaattacagacgtaggtcacactgtatttctgttagatgctgctgcttaacaggggtagaaggggtagaagattaactatttgcactatttaaatgaaaatatttttgctttttattccagcatacttaatctccaatgatgtttaaagtgttaaatttattcttttataggaaaatggctttgtaaagaagtttgaacctaaatctggctggatgacttttctagaagttacaggaaagatctgtgaaatgctatctctcctgaagcaatactgttgaccagaaaggacactccatattgtgaaaccggcctaatttttctgactgatatggaaacgattgccaacacatacttctacttttaaataaacaactttgatgatgtaacttgaccttccagagttatggaaattttgtccccatgtaatgaataaattgtatgtatttttctcta

SEQ ID NO: 81 - DNA, 77318 bp, Homo sapiens
tttcctgcttaaagtcctgttcctctcaaatctatctttcatactcaagtcagagtgatctacctaaaatgtaaatctaaatctgatccatcacatacatctcttgctgaagaattcttcagtagtcccctctcttctagaatacccaagattccaggctgacctcatcttttttcactctcacctgaaactttatcctcatctgccatatataatcttgacctttccttgtgattttgctcctgctgccctgccctgtctgcaaaacctcacttgtattataattggaagaacaggaagttgttcagctggcgtatgcaggtgacagctgttttaaaaaaaaaaaaaagctggaaaaggttaggttccattatagttgaaataaccttaaaatccaggtcgaggagacaagagtgatgaggtatcaccgaaggccttgaccaggcgtaatatgatcaaaactgccagcgcatataggacagatggagaatcagatgtgcatgaatagcacaaacattgtgatgtgcacacatcaactatgatgtcaagagtaggaatccggaagagaaatggaattcaagacattctgatcctatgagatattaccatcaacaccttctattcacactctatctcccaagtgctagcagtctaaaggtaagatccatttctcgtgtaaagggaaatttgttaaaacattcattagtaactatggagaaagaagtatcagtggtggtaagaattacaacaaaactgatagaaacaaaaggacaaaatgtgttaagaaggtagagaaaatgataatgggccaggtgcgatggctcacacctataatcccaacagttttgggaggccaaggagtaaggattgccaaagtacagcagttcaagaccagcctgggcaacatagggaagacctcatctctacaaaaattaagaaattagctgcgcttggtggcgcacacctgaaatcagttactcgggaagctgaagtgaggtgtgattacaccactgcactccagcctggatgagagagaggccctgtctcaagaaaagggcgggggggttagtgggaaaaaaaagtaaagaaaatgataaaagccagcctttagcaaagtaaaatgtgaagaagtcatttagtaacaagtgaaagaagagtaaatacgtgcttttgtggaaatttaaacaatctctgtaagggaagtaaaaggactgtgactgaaccttaaggaacattctattggcaaaagaaacagaacaggactgtgcccatagatttttggtgtctccaatgaccagaatactatcttagaagactttaataacacataagaagacttctatatgtaccaaatgaagggagagtacacaaagaattgaagaaacattcagattttaaaatcagaaacaaggatacagctgcctctaattattttgtataattacaccgtaagattgagcctaaactaccagagctggatgatcaattatgtcactagatttcagatctacgtagacatagtaaatactacacagtacacatcaaagttctaacaattaaaaaggagacactaaagaggttgctgacactaggaaaaacagttctatacacagaggggacaagagaacagagataaagtcctcagatggctttcctaatcagtgaaagtaaagcaataaagagcaaatgttcttttattgattacatcctcagacaccaagatatctgaaaaatgtctggaattgatgaactaatacttataaggcatgaaaatttcaaaaaaaacttaaaactttgccttcttggccacaaaaaacagtctaaatgagacattatcaaaatttttcatctagtattcttaaagctcaaagcatacgtacctataaaagataagctcttatatttagcattaaatgtttaaaattaacatgtaataatgtggactaaaaaccaattcctcaactaaagacatttatataacttgaaatacttacagtacactcttgcatctcttgttccttggttgctagtcgcattacaaggatgttttccctgcgtgcagactcctgctgttgttgctttagtttttcttcagactctcttaggccagttacatcattagctgatgattcaaaaaaaaattataaatacaattttaagatcaagttctaaatacctctgtcaagaacaataagaactagggtcaaaaaattaatcaagtctttagtttccatcctaactacttttataacaggcgaatttcttcctggtcacgagagctcctttaggagacaatggtgtcatagtgctccatgactactaactaaattatgtttttatagtttcatctactcccaacagaagacagaaaacatctgtgttatacagtattcacaaaatcctgattagtatgttttaacctatttaatataaaaatgctgtctgggcacagaggctcacgcctgtaatcccagcactttgggaggctgaggcaggtagatcacctgaggtcaggagtttcagaccagcctaaccaacacggtgaaacaccgtctctactaaaaatacaaaattagccagtcgtggtgatgcatgtctgtaatcccagctacttgggaggctgaggcaggtcaatgacttgaacctgggaggcagaggttgcactaagcccagattgtgccactgcactccagcctgggcaacagtgcgagaccctgtctcaaacaaacaaataaataaataaaatagtaataactgctggacaatttgtattttaaacttgaggcaggatcttattctgttacccaggcaggagtccagtggcacaatcagggctcactgcagcagccttgacctcccgggctctagtgatcctcctgactctttttttttttgtagagacaaggtctccctatgttgcctatgctggtctcaaactcctgggctcaagtgatcttcccaccttggcctcccaaagtgctgggattataggtgtgagccactgtgcctagccttaaactttcacaatgttcatgacttctatgggtaacacagtcacgcaaaattagaatttcagggtattaacccttctgaagttacaaaacaatatatattggtttttatactcaacaaatagtatgtgattcaaacagtaaaaagtgagactaaaatggcttaaaatgataaacgttattttcagcagatttaaaaaaatctgtatatattattaagttatatatattgatttaagctgtcataaatctgttactggttgcttctgtttatttctcttctagactagtaactcatgcttcaagtcaaattcctatgcagaaggggttagggacaagtaagaaaagtttcaagtagttctgagttactgcatctatattcagaaccttgcatataattttgctaagtcatgccattacatgactattacacctctgtcttctccaatgactgagactgtgtctcattcatctttatattttcttgcacccaacacagtgcctatgtacagttcttataataaaacacgagaaaaattacatttgctttaataaaaacaactatccttttgattttaacaatcaaaaggagattattcagtctttaggaagctaaaactcaaacttacagttaagatctgtgtacttgccctccaaagcttgtacatatgcttcatattgtttccatctaataaaaaaaaatccatacattagttgttacgataaaatagtttattaaataaactagaagatatctataaactcacagattttagtaatactgagcattcttctggatttttcattttaaatctagttttttttagacagagtctcgctctgtcccccaggctggagtgcagcgtggcgcaaacagggtctgggctcaagcgatgtccctgcctcagcttcctgtatagctgggaccaaaggcacatggctcatttttttgtagagatggggtctcactacgttgcccaggctggtcttgaactcccgagctcaaatgatcctcacaccctggcctcccaaactgctgaaattacaggcctgagtcaccacacccagcctaaatctagtttaactgatcataaaatagtccctcattattccttcccattttacaggaaacaggtaaaaagagatatatagagaaggttttttctgctgagaacatgccaagcatgccctgggtgagatcaaaccccagattcactttgatatcactgatgttcaggataatcctggattatagaagctgaaaaaaaaatcccactgctgctttcatatgttgtccacttagaacaaaaggcatattagaaatgtgcctcattatgtagaattgaaggttctttatcttggctcttttgggaaaataccatgtgactcttctcaaggtagtatcaatttctgcctgtaaacacagggggagaatataacatttttcaagactgtaatttaacaatcacatctaactgtcagaaacctgcataaatgccatatgctatcagaatacaaggggaccgttgttcttcattatacttctctaccctgaatatatacactgctaggtcctcttagcaataaagatttttcctagtcttattaggcagttcctaatggaaagcaccctgccctgaatgtctgctatcctgcatacttaagagccatgttttcaagctgctcttcaggtacaattaattaaaatttggctttagaaaaccattttataatcttaaaaacaggcttgtcatgagttattaatattacaacataatgaacaaaaaggctcgtgcctgtaatcccagcactttgggaggccgaggcgggcagatcatgaggtcaagaaatcaagaccatcctggccaacacagtgaaatcccgtctctactgaaaatacaaaaaaattagcagggcatggtggcgcatgcccgtagtcccagctacttgggaggctgaggcaggagaaccgcttgaccgggaggcggcggttgcagtgagccgagatcgcgcaactgcattccagcctggtgacagagcgagactctgtcttaaaaaaaaaaaaaagaaagaaaaaagaaaaaaaaaaaaccttcctaataccaaactaatccactttctatgtaaacactgatgttcagccaaggccatgctttatttttacggcacttacaacctaagacacgtagtttaccaaatatttggggatgtatagagaaagatcttcagtggaggctataaaagaacgatttattttagaagtacagaaaaatataaaaactgaagcaagaacatgtatatcacaaggatagaaggcacagactagttaaataagtagcagctggtttaaaatctccaagggaatcaaagagaaaaaactcgcctaaaagtcttacatgaattccctaaggaaagatgttaaactgacctcaaggaaatacactgcatatgatttagaaaccttaaaggtatcttaaaataaaacatttctatgattctttattaagattactgatttttcccctcctacagttaaatcaaaaaaatgactgcacagactaaccagagcaattatgtaagaaggcattaaaaaaagtatacaatgccagagacagggaaaaaaaaaatcatggccaggcatggtggcccatgcctgtaatcccagcactttgggaggccaaggtgagagaatcacttcaggccaggcattcaagaccagcctgagcagcacctcacctctattataatttatatgcacattaaaacaaacaaaaaaaaacccagcattgagtagtagtgtatcttaagtatatacttcagcataagacagaagtgttttagaataacaaaaatttaaattttatgtgcagaaagacaaaggtatgcaatggaaactgtcctatgtatgagattatggcaaaaaaaaaaaaaaaaaaaaaaaaaaaaaaaaaggtaaaaagtgtgttcataatacagtagctgtccaaaggtgaaagtaggaaattgtcacactctaggaaacaacaaaatctgtgttagcctatctcacaaaacatcttttctctcctccgctttcagcctgttaaaatacttattttatttttatctaagttatcaagaaacttactaaccatagcaataaaatacagaaagaatatatttaaattacaaaacacagaacatcctacttcctgatttcttacacaatctaaaaagattatacgttgtacttgacaatctgcttttgtaagacatttacaagataaccgcagaaattcagaactggaagtcacctttaacaataacttaacccaacctcttcaacttacagatgagaaaatgaagagtatgaagttatatgagctggtgaaggtcacactaataagaaaaagtaacctcacttcattagtaaattatgtatttcttccataaatataagtgcatcttttaggattacatttctttttcaaatgttaaacacgaaaggaaaaactacacaaaacaagccatatatttgttaaacttatagcttcctagtagttctttaaagtgttacgttttcctcggtgttaatataagaaataggtcatagtatgctcaaaaagtacattaaattatttgaggatagaacaacattaaaaacaatatctggcacaaagacaattacagtgtagagtcacaatataatgttctatagaaagactttgtttttgaacagagaacattttaccttagaattaactcatctcttgccataactttgaagtctgtttcactcaatcgaacctataaagagaattacaatatgaatttagtgttcttcctgaagacacaaagttctataatgagacctatgaaacatctcccaagtgtgagatttaaacggctcagtacatattatgattttttgaaaaagtattttattacaaaagttttttttttttaaggtaaactatttggtatcttaacaatgggcatcatcattaggaaaatgcacattaaaaccccaggtatcaccacacactgattagaatggctaaaataaaaattagtggcaacaccaaacgctggtgaggattcagagaaactgaagtttcctacactgcaggtgagaatataaaaatggtatctgaagaagtatggcagttccttttattaatacaactaaaaatgaatgtgccatataactcagcagttgcactcttaaacatgtatctcaaagaaatgaaaacatgcaagcagctttacttgtaaaagctaaaaaactgaaaactatccaaatgtcctttaacaggcaaatgattgaactatcatacagccacaccatggaacactttaagcaataaaaagaaacaggactactgatacatgaaacaatttgtataagccttaaggaaactgtgctaagtggaaggaaaaaaaatagtctcaaaaagatgcatactacatgattacatttatataacactctgaagtaacaattatacaaatggagataaattagtggttgccaggggtcaggcatggagagggacggggtagatgtggctataaaagaataactcgatgaagctttatggtgatagttcagatatgtatcttgattaatgatggttacacaaagctagacatgataatagtgcatatagctcttccccacttcccccaataacagtgctagtataacgtgaaatgtgaataagctctgtggattgtaccaatgtcaattccctgattttcacagttattagagatgtctgctagtcacgcaaggtgttaacaatgaagcaggctcagtgaaagttgcacagaacctctctgtacatttatttgcaacttcctatgaatctataattatttcaaaacaaaaagctgaaagaagggcataagctaacatgcttcaaaaattgagaaacagtatattcactacaccaaataaaggctgtaaaggtgagatacctctcctacctcagtataaaattaaggctttggctgggcattgtggctcatgcctcctgcactttgggagactgaggcgggagtatatcttgaactcgggagttcaagatcagcctgggtaacatggcaaaaccccatctctaccaaaaaatacaaaaattagccaggcgtagtggcacacctgtagtctgagctactttggggggcaaaggtgggaggatcgcataagctggggtatgaggccacaatgagccaagattgtaccactgcactccagcatgggcaacagagtgagactctgtctcagaaaataaaaaataaaaataaaataaaggctttattagtattcccttacaagacacttaaatttttttccttaaaaatgtttcaaattataatactaaccagtaaaatagtattaccataaaatggaacgagggaactattataatgtaacatattgaaaggctgccagaggcagctcatgcctattatcccagcactttggaaggcagaggcaggtggctatctcttgagcccgggagttcgagaccagcctgggcaacatggtaaaaccccatctctacaagaaatacaaaaattagctgggcgtggtggcacgtacttgtagcccccagatactcaggaggccgaggtgggatgatcgcttgagcccaggaggcggagactgcagtaagccaagattgcaccactgcactccaacctgggcaagagagcaagaccctgttccaagggaggaaaatcaaagggtaccagagggagcacacagtaattctcagattatgaaagcataatacaatcctttattcatttaatgagtaatctgactccacaataggaaacttctgtaatatctaaattattcacttaaatattaagtttagtaagctttcccaattgaatcacaaattcctcctagagacgatgttacctcttttataacagccactgtgtgtgtgtatgtgtgtgtatgtaagagtaattaaactcaaggtaggaatgcacaacagggggagatttgagactagacaacaaaacttcagagaaaaaggtagaatttgaaaattagctataaccatttttttaataaagtagtttttaattacaatcaaagggatttacactaggaaaagaataataatatactcataatgtccatttttgacattatttgtatatatgtacctggaaatatttacataatgaacattaagagtagacctggaaatattcacataatgaacattaagagtagaccatgggaatattattataactaaagttttccaaaatctgaaaatattctaaaaaatatactggatataagatacaatatctggcacactgtacaactccaatgctattattgttataaaggcaaagaaatgaaaaataagcaaacaacgataatcccttcaagtctatttttttttaaagtgcttaaaaaagcccccaaaaaacccaaaacaaaacaaaaaaacccaaaaccaaaacccataccttcttgggaagaggttcttcgttggtcatcttgaatcctaaaaaaaaaagttgcggaaaacaagttcaatttattttcttccagtgaaagtaggaataaaaaatactgactctttcaaatcaatttattagtgaactaaattactgttgaataattagaatttaaataaacaattttaaaatagttttagatttacaaaaaagtggcaaagatattacagagttcctatatactctgtacccagatcttcctttgttaacatcttccatcattagagttattgggtagtttttacaaattccctcgtaaaaaagctgatcagccattcaaatcatttgatgtcgccataaagggtgaagagaaatataatgacctcaagtagtatcctacgcatgttgctaagggactataaaagggtaataccagtttaagtctttccttttatagcattatgttgttaaagtaaggtagtacctaccacagccataatttactactgcccaatagttttttagatatattatatattttatttttattttttttgagacacagtctcactctgtcgcccaggatggagtgcagtggcgcgatctcaggtcactgcaacctccgcctccagggttcaagcaattctcctgcctcagccccctaaatagctgggactacaggtgcgtgccaccacacctggctcatttttgtatttttagtagagacggggtttcaccgtgttggtcaggctggtctcgaactcctgacattgcaacccgtccgccttggcctcccaaagtgctgggattacaggaatgaaccaccacgcccatcctattacatattttaaaatatatgttacactggttgggcgtgatggctcacgactgtaatctcagcattttgggaggctggtgggtggatcacttgaggtcagaagttcaagacaagtctggccaacatggtgaaactcggtctctaccaaaaaattaaaaaaattagcccggcgtagtggcacacgcctgtaatcccagctactagggagactgaggcaggaatcgcctgaacctgggaggcggaggttgcagtgagccgagatggcgcgccactgcattccagcctgggcaacagagactccatctcaaacaaacaaacaacaaaaactcacatacacatgtatgtcacaccttaataaaaatattcctacagtatttaattttatgccaaatattttgtatctcaaaattagcttctttattatacaaaattcacttaaccctgtttcaaagataggttaatgaattcaagtagggaacactttattatgctgttttttagaacgaatgctaatagcaggtattattcattaaactacaaatccacacacaaaaaaaagacaaagaaaaaatgtgtaataaacataaacaccacattaaaatacaaggttggaaaaaaaagtatacgacatgaagagctaacctgacaaacataaaatctttatataaaaattctatgaggattaaaaaattgaatcagggttctgagtaccagtgctcttttgaaaaagcatctaaattgcatttggcatattcataacttatacaaattaagtaattagttcttatactaatttagtttttcctattctttctttcttaagagatggggacccaccatagtgcccaggctagtcttgaactcttgggctcaagtcatactctcatctcagcctcccaagtagctagaactacctgtggaaggatcacgcccagccctagttattatttctaatagtatactcatgaatcttcccttactttaaagtgtttatggtttattttaattacccatacttattataaattctaaactactagaaatttgaccaaaagcttggtatgttaaactgaatttttttttttttttttgagatggagtctcactctgttgccaggctggagtgctgtggcatcatctcgaaagctacttgaggctggtgtggtggctcacacttgtaatcccagcactttgggaggctgaggcaggagagctgcttgagcctaggagtttgaaccgagcccgggcaatgtggtaagaccctgtctctcattaaaacaaacaaacaaaacacacacacaccaagactacttgatttctcccacttgattttgagattcctcaaaaggagataatcttccaacagcatgttttatactacgtacaatctcaactccactttataaatgaaacattctaatcatactgttattaaaccctggttttcagattaagtaaattgtgttgaagaaagcagaatttagaggaaaaatcataaattgatcttagattactggcttgcttctttctctgtttaatctttttttttggagatggagtttcgctcttgttgcccggggtggagtgcaacggcgcgatctcggctcaccgcaacctccgcctcctgggttcaagcaattctcctgcctcagcctcccaagtagctgggattacaggcatgcgccaccacgcccggctaacttccttgtatttttagtagagacggggtttctccatgttggtcagggtggtctggaaatcccgacctcaggtgatctgcccacctcagcctcccaagtgctgggactacaggcatgagccagcgtgctgggcttttttttttttttgagacagtctcgctctgtcacctagaccacagtgcagtggtgcgatgatggctcactgcaatcttgacctcccaggctcaagtgatcctcccacctcagcctcccgagtacctgggactacaggcatgtgccaccacacccagttaattttttgtaattttttttggtagagacagggtttcgccatgctgcccaggctggtctcgaactcctgggcgcaagcaatccaactgccttggcctcccaaagtgctggcattacaggcgtgagccactgcaccctgccttccctctttaatctttctcaagggatacagcaaacagataaaaacctcagtatttgtttctgagctaattgtatacagtctgtttcactgagcaagtcactctgtcctatgaagacataaaccatattactatgatataaaatgtatattattctttttttctttaaattggttcctcccttgttgcccagtttattatctctgctgccattacagaaagctgctttgtaactaccttaacctggtggcagtcattttaatcatctcagaaaccatcaccatatttaactccacatgtctaactacttctattttagcatgacacatgcattaggctgcaaagtcttagaacccagatatcaaatctggcatttccttgtaatttcccatttgtctggagctaaatatcaattttacacacacacacacacacacacacacacacactatatatatatacagagagagagagagagagagagaaagaagcagacagagacactccccctccccctgcgcccggtctctgttgcccaggctggagtgcaatggcgcgatctcggctcactgcaacctccaccgcctggattcaagcgattctcctgcctcagcctccagagtagctgagattacaggtgcctgccaccacgcccggctaatttttgtatttttagtttcaccatgttgaccaggctggtctcgaactcctcacctcaggtaatccacctgctttggcctcccaaagtgttgggattacaggtgtaagctactgcgcccggccaataatatttttaatttaaaaaatcttaaagacaattttagctatttgagctgtacatatttaaccggtatatcagtatctgtatctatgtatatacgaacataaaattttgagaaccaaccaggaacttcacgtaacaggtactgtggtagagatctgtgaatgacagtttgaaaacagctatatttatcactatggctaggtggtataccttttatctagttactaaggcatcctacctactcagtatgtacaactttagttgtaatactaaagtatcatggatgctgttcaatataaattccagcttataaaagttattatagttggtccttgaccaacccaggttttagctgcatgggtccatttatatttggatttttttcaatcaaactcagattaaaaaatacagtactcggatcaaaaatacagcattcacgggatgcgaaacctgagtatgcaaagggcagacttttcatacaccagggttcaaattcctatgccaggattttggcaaggatcatcggtatgtggttctacaacctgatactttccctaggtttacttgcttactctcttcttaaagacaggtatccatattcttattccactaaaataaaattaacagtaagcttagcaaaaaatgagatgataatctgtttttaaagggcattaaaaggactgagaaacacatgaagaaagttctgataaccttggtattctgaaacaggttgtcaactttgcaaatacaaaagtagcaaaatctctgcacctcagtttccccatctcaaaaagaattaccacaaccagggcccaaatactgtgctatttctgaagacagacattaatctttagcatggtaactggcacaaaatgggcatttaattaatagtttcttctccccatcaaaaacacagactcagtgtttcttgaaaaacctgaagagataatccacaggttgaggataataatcatactgtcctcccgactgtttctaacacttactgcagaattctttggcatctccaatatttaggattctaaacagaagttacttaaattttctttttttcctctctttttttgagacagagtctcactctgtcgcccaggctggagtgcagtgactcgatcacagctcactgcagcctccatctcttgggctcaactgatcctcttgcctcagcctcctttgtagctgggatcacaggcatgaaccaccacgcccagctaatttgttttttttttcttggtagtagagatgaggtcttgctatgttgcccaggctggtcttgaactcctgggctcaggaatcctcctgcttgggcctccaaaagtgctgggactacagttgtgagccaccatgcccagcctgcaattattgaaatttcttttctttttttcttttttttgagacgtagtctctctctgttgcccaggctggagtgcacgggcatgatctgggctcactgcaacctccgcctcccgggttcaagcgattctactgcctcagcctcccaaggagctggaactacaggcacgcaccaccatgcccagctaatttttgtatttcttttttttttctagtagagacagcgtttcactatgttggccaggctggtctccaactcctgacattggcttatgttctttttaaaaagtttgatggtgagtagattttaattaaatggtgctttttattgaaattttctttaaaaataaaactctgtatttgtaatgtaagtcaggagtaaatacagattttggataaatgtctacacttcctaagtcaactctcagagtcacttttaagatcactctagctgtctggggtatccaacttgggaaattcagagcctcagtatttagaaagaaaatccttcctcaactttaatctgatgaaaagtaaatctttccttgaaagtcgatgatatgccacaaagttaaatgcgccatctggcaaaaggcaaattagaacaggttcaaaatttacaactgtctacaacattcaactatttggtcaaaatagaacctaattggcaattttgactttcacaccacacgaatgtaccgagaagtttggtattccccagggcaattttttttttagcgcaaatgacaaacacaataacctaaatttaaagtcaattctagattcataaaggcaatgaatattctaggttctcagaacaatctattctcgtatcagaaaaacagaatgaccataacatcatttggagtcaattaaagttgaatcctgaaggaaaataataaagaaaatatgttcagttcttatgaatcacacatttaataacagcacttttcaaagtcaaagttagttcccattttccaggatgaaaatgactgttagtcattaggtgatcagctattaggtgattaaaacagctattaattaataaattgggggtaagggtctcaaatttggtgcccctcaaaagggtggtaacatgattgactagttttaaaattacataaaagtttcagttatttatgtagataattcagagataatatatctcagaaaatcaggaccaccatctactcttgatgccttaacacagaaaaacagcttagtatggagttcagtctagactggttaggtgcctagcatcccagatcccagtaccttcctggctcttagcatcataaagttaggtaactcagttccctctgaacggaggcaagcgccagccaaaacaacttcagtaagaagacacggtaccttggcgaacaaatcatagctgaatgtaagacaccaatctgcagacactgtagtagcaaggtactgatgaggaactgaaaggccatcttttccttatcctctatctgccatgtgtgattccaagcaagtcttttaactcttgcagtttccaagtcagcaaaaagataattttgcctgtctcacaaagtgctgcaaatattaatgctttcagcacaataaaaatgctatagatttttcaaataaaatatgaacataatatgaacataaaaggcaacttcaatgtgcacttagaaaagattaaattctattaactacatcttcaaaggcagaaaatatttacagcaatatattttagtcagatggaacatcttgttatacacaatacacaatgaagtttactattgtggagatactgaaaagtttttctgtgttaagcttagtaactacaagaagcaaaatatttagaggcagaaaagttggagacaactaaaaaaattaaaaacaagaataaaaccaaaatactatcttcagtcttcttttgctgaaggacctactaactaacgtacaattttgaggagcaagaagcaaatacataatgatcaaaactgctaaacaatatattcaaggggattcaatactacatacaagaccataagagaccttgaacgctttaatgtactgtacaaattgtgacaatgctcatctccacatcacagggctttttacacattgtgtttcatctctaccagcttatttctgacaaacaatacacaaaaatattttcagcaaacatgactcaacgttgaattggaaaagctagacataaaagagccatgtaaaaataagcagtgcctgggacacactattattattacttttatcctttaggagttagcaattctggtagcttgtccaaattctgccaatgaaaaagtactaaaaatactgaacttttaaaccatgtgtctgcttaagataccttaacatataaaagcactgtaagaaacacacctacccaaacccttaaaatgtaacctcaaccttatcacaagccagctttgcggactgcaatctttccccgacttggctaatcagatgctacttgaatgaattaaaatgtatccatcttgaaaagatttttcgctcatagttttaaattacggttttaaatgtccacaacatgtttatctatcgtagaaaacttaatggtcaaaattttaaaatccaaaaaacgagaacttgcgatggatctatgacgtccacttatcttccgaagcaatggaattaactaaaactagataaaataggcacaaatacaacttccaattgtaacatactcatagaagtatttccctaccagactaaataatagtttttttgttttgttttgttttttttacataatcacagttatgctagtccttgataatgttaagctaatcctttgggatcaaacaaccaagtgactttcttatcaaaacaagaactcgggcttttccattacgtgtacacagacttatgaaaaacggtgaaaaaaaaatctagtaactgtctcacagggatccaaggtaagacttggatttcacaaaaatctgcaataattcagtttctttcctcagaatgcttatactcatttaaaaatggaagtctacaagagaacgtagtaacatcctactgcgtgacatgaaatgtagggaacgaatgtttctttttttccttgctgaactcgttagtgccgccaggtcctcaggagaggcccaagggaggtgaagggggcgaccccgaggcgaggaaaaaacgagcgccgccgctcagcccggggagggcatcctccggcctccgtgagtggccggtctctccggccgccagagcacccctctcaacccgggccttggggacggaggacagagataaaatggcctcgaagcggcggaagtgttccccgcaggcgggaaggtagagcggctcacgagagaccggtgccgcaccaggcccgtgtggcctttcgggccctgcccgccccttacccgccgggggcggctgcgcatcagccctcaggccccggaggtcccccgcgtccgctcccgccagccggcccgcgcctacctctccaggcagaagccgcgccggcgccaccggtcgcataggccgaggccgcgctgcttgccctgccgcccgggccccccgggccaccgcgcagccggacagctctgccgccggccccgccgcgctcctagtcccgccgcaacccctgcgctcccctttatttgtgggtctcgctgccacaaaatggcgctgagggaggaaaccaggccccgccgcccggccccgccccgccgcacggctccgctccgccctgccccgccccacagccggtccgaacgcgccgcaggccagcgccactgcctcccgcctcccgcctcccgcctcccgccagcctccccgctccgccatgttcgccttctggcccactcacaggagagtcgcctttcaggcgtggccgcagtcactcgcccgccgccgaaccccgccaggagaggaaaggtgaagggagggaggccgtcggcctagcccgatcggggcctcgaggcacaatggagcagctgctccccggtaacactccccgtcctttcccaggagcctggcgcgagctccgcgggccccggagctcagcaagctcagtaagggaagcggccgaggggaggggcgggccagcgaggtcggaggtcagccccagggcatcacgggaagggaaggtggaagtactcgccggggccacctgcggctgcggggctgcctcgtgcggagggatctgggcgaaggcggcgcgtgattggccgctctgtgttcgtgacgctcatccgtgatgcttccgcgtgtcggaggaccaggtgccacctcaagagagaggccgtgggcggcgagccgcgggcgtttactcttagcagaagctcacctgtaagttttgagaacttagaaaccgatgccttccctctcatcagtcgtgaggcgcagtctcctggccgctgggttcgttcctccttgacatctctggagacgcatcgaggagctattgttctctggcgtcggaggttgcgctgtgtccgcggcgttgagggccccttgctaactggaacacggggaaggcggccctgtgaggtttagtgaactcaatcaaagaggtcctgcaagtggagtagactccctgaagtaagactgccatctggaccgccgagtaatggcggtgttacctggagaacgtgaaacagtctctaaacacttactagaagagcacgtaattcttttgattggtctgtccttagccggctttatcaaacctgttcatccccaaaggagtgtcttgtagtaaggtgatttattaggataagattaaagtacattccagatggtcgtagtatatttccagtgaatcagatcggtctggagaaaatctttgcaactcgtatcacaagagctctcaaaaattgaaaacaaaaagtgcaaaagccaaaggagaaaatggggaaggacatgaacagatgattctcagaaaaaataccgtaatggtctttaaacatagaaagtcgctccacctcacttacaatggaaatacacgttgaaattacctttcctggtgggagtggaaaaatggttcaagttccacggagtacaaaattacttgtgtttattcttataccttgcagttatacttctaaccctaaccttattctgaaggtgcagctccacacatggaaacaataggtatacaaggttattgcagtgctatttgtcatagcaaaagttagggataacccaaatatccgttaatagggaactgattgggaatggtgcatccatacagtagaacacaatgcaaccattaaaaagattcaggaaataatcgtgtgttgctttggaatgagtctcaggttgtattaagtattcacttaaatatttaagtgtagtaagtattcactgtattcaaaagcaaaaataagcatatatgcttttatgtatttacttaaatacataaaaatatatatttatatttaatatgaatatttatgtgtatatgcttattttcggggaggaattggaaggatatcctggaaacttaacatttttagttgcctataaagagtggggggtggagacaagatttctctgtctttgaacttttagttttacatagccaaaaaagtaaataaaaaaggaaacaaagtaaatcctaaggttgaaagcaaattgaaacaaatgaacttaactgttaactaatataactaagatacacagaaaaaataattattctttgggtttttttttttttttttgagacagtctcactgtgttgcccaggctggagtgcagtggtgcaatctcagctcactgcaacctctgtctcctgggttcaagcgattctctcagctcagcctcctgaatagctgggattacaggcatgcgccaccatcccctgctgatttttgtatttttaatagagatgggatttcaccatgttggccaggctggtctggaactcctgacctcaggtgatccgcctgcaggttggcctcccaaagtgctgggattacaggaatgaaccaccaccactggcccctctgagcttttgaacacagtactctagtagtgtatctgtgttgtgatagtgtagtctttccttatatgcaggagattggatttaggaccttctgcgagcatatacagaaatctgcatactaaagtcccggagctgagcatagggaaagttggttctttgtgtaggtgtgttttgcatcccactgtacttctgttttgttttcttccttccttccctttcctttctttttcttttctttttttctttctctccctctcttcttccctcccttcttccctccctccctctcttcccccctcccttccttcccttctcttgcttttctttttttttttcttttttgagaacagggtctgactctgtcgtccaggctggagtgcagtggtacgatcatggctcactacagccttgacttcctgggctcaagcaatcctcccatctcagcctcccgagtagctgggaccacaggcatgtgccagcacatctagctaatttttttctattttcagtagagagctgtgttgcctaggctggtcttgaactcctgggctcaagtgatcctcccacctagcctcccaaaatgctgggattataggtgtgagccaccgtccctcgccccactgtatttttcatctgtgttggggtgaaaaaaatccacatataggtggaccctggcagtccaaaccagtgttgttcaagggtcaactgtgtattctaaggatgaaaaaagtgcacaggagctttcagcttcactgatttatgattaatggtaacattgttactgtggttttaaaactctgtactgtatatggtaggataacataagtattttaatgttactatatacaaagatgtgcagtgtgtgagagaatgagatacaaacacaagatcaaagaagttcagaaaagggccgggtggctgatgcctgtaatcccagcactttgataggccaaagcgggaggatcactagagtccaggagtttgagaccagcctgggcaacatagcaagaccctgtctccattttttaaaaaatttaaaacaatttttaagacgttcattcatccgggggtgggggtggaaactaatataaagaattttaagaagttcagaaaaaaaaagtctgtagtattgagtttaaactggagggctgggtgcagtggcacacacctgtaatcccagtgctttgggaagccaaagtggcttaggagttcaagaccagcctgggcaacacagtgagatcttgtctctacaaaatacaaaataataaaatagccaggggtggtggcctgtgcctatagtcctagctacttgggaggctgaggcgagaggcccaaatgagcccaggagtttaaagttacaatgagctgtgatctcaccagtgcactacagcttgggcaacagaccctatcaaaaagaaaaaaaagtttcaactgcaaaaaaaagtcctagttctgtggactgaaagggcctagaagcactagggtgaccagttgttctagtttgccacaaacagaggggttttctctggatgctggactttcagattaaaactggaacagtcctggctgaaccaggatgtataggcatgggcaccctacagtaacagtgagcacatctgacactgagatcttggtttctaaattccatttcccactaaaaagatccagagctcctttggagaactggctgattccagctctgggacgggaaaggtacaagatgagccaggtatttcgttgtgcctgaatgcagaggaagtgcttagaccaatgaggctatgccaactgtagttaggagaacaaacaacactaatccatagtggtagatagcagatcagtggttggttaggaggggaagagagaaggaattgactggaaaggaaaatgggagaacttttgggggtgatggaaatgttctgtgtcatggttagtgggaatgtatacgtttgtcaaaattcatcaaattgtgtcactgtaaagaatgcattttattgcaaaccaaatgagaaaagcaaagtcgattgagaacttgctgtagcaagggagtcagccaccatcccttatgttttagcagaggttcaaaggcatgcagaggagtgggaaagctttacagtggacaaaaggaaaggtttcacaggtatgcctgattggaagctgttggcatggggaagctggaagctaactacaagttggcatcctatggtcttggttaaaggagcatatttggctttctctggatgggcataagctagaagtgaggacaaaaagtagggaagctgtcaagttttaatcaagtcctggccattttgagctgattgtcatagaagttattatttagcttcctggattgctaccagagatagcagtctgacttcctacaagtctggttgatagcaggtttggctttcaggctgagagtacacttatggtaaataagtggttggtttactgggctagttgttgtaggtaatgggtcagaattctgtttttatgtatattctggccatttaccatttgtattttcagtctctcaaaaataaattttagagacatgggagccagcttgaaggatctcccagggggcaaatttagggcaattttagcgtcaaaaagaaaatgaatacaattgattgcaaatactgaataaataaaagtctactctctagtacagagaagagagaatgagaagagggaaactatttttccatcattggtagtgtctattacaccaatttgatactctgaaaattagttattaaagggagatagcatttaccctgtttgttttttgtttcatttgtttttgtttttaagacagagtcttgctctgtcatccaggctggagtgcagtggcacaaacatggctcactgcagtcttgacctcctgggctcaagtgatcctcgtgcctcgtcagaagctgggactacaggtgcctgccaccatacctggctaagtgtttttgcttgcttttttgtttttttagagatggggtcttgctatgttgcccaggctggtcttgaactcctgggctcaagtgatgctcccacctcaacctcccaaagcgctgggagtacaggcatgggccactgctcccaacctaccctgctttttttttctttttttttttaataaagaatgtggtttatacccagttgatgaggaaaaactcttctttactataggatgccagctaataagtataaaataaaatatagaattagacaataaccatgatgcaaaccttaatgaaataattgactcagacaaggactatcaatggacttcaaaacctttagatgaaagattgctgggaaatgccatcaaagtatcactctacaggctacttacctaattgtaaaagaaattacaggctgggtgtggtggcttacgcctgtaatcccagcactttgggaggccgaggctagcagatcatgaggtcaggagttcaagaccaacctggcaacatagtgaaaccccatctctactaaaaatacaaaaaaaaaaaaaaaaaaaaaaaaggtcagccgcagtggctcatgcctgtaatcctgtaatcccagcactttgggaggccaaggcaggcagatcacctgaggttgggagttcgagaccagcctgaccaacgtggagaaaccccgtctctactaaaaatacaaaattagccgggcatggtggcacatgcctgtaatcccagctactcaggaggctgaggcaggagaattgcttgaacccaggagatggaggttgtggtgagccaagatcgcaccattgcactccagcctgggcaatgagagcaaaactccgtctcaaaaataaataaataaaacggctgggcacggtggctcatgcctgtaatcccagcactttgggaggccgaggcgggcagatcacgaggtcaggagattgagaccatcctggctaacatggtgaaaccccatctctactaaaaatacaaaaaattagccaggcgtggtggtggtcaccagtggtcccagctactcgggaggctgaggcaggagaatggcatgaacccaggaggcagagcttgcagcgagctgagattgtgccattgcactccagcctgggtgacagagcgagactccgtctcaaaaaaaaaattaaaaaatataaataaataaaaattaaataaaaataaaaatacaaaaaaaaaatagtcgggtgcagtggcatgtgcctgtagtcccagctccttgggaggctgaggcaggagaatcacttgaacccaggagcagaggttgcactgagccgagatcgcgccattgcactacagcctgggcgacacaacaagacactgtctcaaaaaaaaaaaaaaaaaaaaaaaaaaaggtaaagaaaatacacctgtatagtggagccatctggtggtcaccatttgaaccaaaccatcaaatttagtatcagtaatagtgggacaacctccagtttacagagaatacaagagaaagggttgtcatgcaaatctgatagtactagcaaagataattattctaaaaaaaaagtcgtaagactataagcaataaatagttattgagcagctgagttaggcatactatagtctcagtttcagtatctaaccagcttcaagtcaccatttcaaatgaaatatcaacgcgtgatgaaagttaacttactaccatccttttcttggggttgcactactgtccaatgggtacctagtgagggcagtactgctaactcctgcacaacacaccgaaatcaactagagctttgctttgccttggtgcagtttttggagaaatgaaaaacagctttcccatacacacacagttatttacatattactgtattaaaaagtacatacaggctgggcacggtggcttacgcctgtaatcccagcactctaggaggccgaggtgggcggatcatttgaggtcaagattcgtgaccagcctggccaacatggtgaaactctgtctttgctaaaaaaatatatatttatatatacacaaaaaaattagccgggcgtggtggcgggcgtctgtaatcccagctactccggaggatgagacaggagattcgcttgaacccgggaggcagaggttgcaatgagctgagatcgtgccactgcactccagcctgggagacggagtgagactctgtcccccccaccaaaaaaaaaaaaaagcaaggctgggcatggtgtctcatgcctgtaatcccaggactttgggagaccgaggcaggcagatcacttgaggtcgggagttcgagaccagcctagccaacatggtgaaaccctgtctctgctaaaaaatacaaaaattagccgggtatggtggcacacatttgtaatccaactacttgggaggctgaggcaggagactctcttgaacccgggaggtggaggttgcagtgagccaagatcgcgtgactgcactccaacctgggggacagaataagactctctcaaaaaaaaaaaagaaaataaaagaaaaaaccataatactgagttagattaagtgaattggccacttctttgccatcagcctaatacttagcctgcaacttttttttttttttttttttgagaaagggtgttgctctgttgcccaggctggagtgaggtagcatgatcttggctcactgcagactccacctcctttgcccaggtgatcctcctgtctcagcctctccagtagctgcgaccacaagcacaagccacctctcccgatctcggctcactgcaacctccgcctccttggttcaagcgattttcccacctcagcagcctgagtagctgggattacaggcacatgccaccgtactcagctagagacatgagtagagacatagtaaagacagagtttcaccatgttggccaggctggtcttgaactcctgacctcgtgatccacctgcctctgcctcccaaagtgctgggattataggcatgggttaccatgccagccgacttctcttatctcttatgtggtgaaaacaggaaaagagagctctatggggtcccttttataagggcactgatctcattcatgaaggccctaccttcatgacctaatccccttccaagggcctcaccacctacctccacattaggggttaagatttcaacatgaattttgggtggacgcaaacattcaatctattgcagaagtacagaggaaaaaaaaaacagtaagtctagcttttgttattggcacccagaaatccagggatcctggagagattatcagagttgttggttaaaaatgttaatgttaatccacgacgctctcaagagctcacgtctggtgtgactatgaccatgtcatgctgtttcaccagttagtacctctgctgagtccattctttctgcctggaatgctctttctactcttctatgccaggttatctcctattcacagttagcaattagcctaagacacattatttatttaccttagtttgtgtcaagcatagacagttgtggttttacagatagggaagccaaaccaaacttcctagcctacttttctttttctaatctagtggattttatactgacttacaagattttactgtgagcagcaatgcaacataacccaatatatctaatctttcagatttagtgaacatttagatttttaaaattataattaaagctataacatttagtcttcattttctctgcagaccacaaagacttctgacattctaagttttttttaaaaaataattcagtagattgttatcataatttttactagactattattaaaatattatttcagaaattcatatgttgatgagatatctgcgttcccatgtatgttgaagcaccattcacaataaccaagataaagactcagcctaagtgtccatcaacagatgaatggataaggaaaatgtggtatatatgaccaggcatggtggcttatacctgtaatcccagcactttaggaggctgggaatttagaagtgggagaattgctcaaggagggtttgagaccagcctgggcaacaaagtgagaccccacctctacaaaaaaataaaaattagccaggcatggtggtgtgcgcctatagtcccagctacttgggaggctgaggtgagaagatttcatgagcccaggagttcaaggctatagtgagctatgaatgcacctctgcattccagcctgggtgacagaggggagagaccctatcccagaaagaaagagaaaaggagagagaaagaaaaagaaaaaaaaattgtgtatgtgtgagtgtatatatatatacacatatacacacacacacacacacacacacacacacatatccatacatatatatgtatgaatactatttagccacaggaggacattatattaagtgaaataagccaagcacagaaagagaagtactgcatgttctcactgataggtgaaagctaaaaaagttgatctcatggaagtagagagtagaatagcggttactagagactggaaagggtaggggtagggaggggacagccagaggttattaacagatacaacagtacagctagatgggaggaataagtgctagtgttctacagcaccattgggtaactataataacaaacaatttattgtatattttcaaatagaagagcagattttgaatattttcagcacaaagaaataatagatatttgaattgatagatgtgccaattaccctgatttgatcactacacattgtatacatgtatggaaatatcacagtgtactccagaatatgtacagttattatgtgtcaaataaaaataataattttatggttaggcacagtggctcatgcctataagcctagaactttgggatactgaggtgggagaagtccttgaacccaggagttcaagaccctcctgggcaacacagcgagaccctgtctctaattctaaaataattatagtaaaaaaataaagatagagttaggttttaaacattctgaactccttggtgggagtaaggagcatctgttggtcaacagaggtaacagaggtatgggtagctcagagtcaattattctcggaaacaggcttgtccagctactggaaaaaaatcccttcattaggaaaaataaaggcaccttttgcatgtaatttccctgtcctgatccctgtaattctttcctagttgcccattcagtacaaataatagcagctttctgaaaaggatttagcatgccagaatgactaggcattgctgtactccttccaacatctgctggggtattgtggcacacactactgggagccatgttcctcctcttgcacaatctaggaacttctaaattgtgtttgagtcatagtatcttcaggccaggagatgaattatggctggtgtaagccagtgtttctcaacaagtgtgctactggaattttggacaagacaatttgtgtgtgtgtgaaaagtatcttgtgcattttaggacatttagcatccccacaccaacccactagatgccaatagcacctctctgtatatgtgacagctgaaagtgtccctttctatattttcaatactgccccctcccgtcatgcccttgatgagaactgctggtctaaggcaagcatggctgtcatggtctttaccacatagtgatggtgctcagtcttcttgcaggcagagttggccagttgagcagttctggctgggatcagaggaaatctctcggggcttctgagaaaaattttccttccggggagaggcacatgaggtgaaatgttttccccctcccttccttgttgtctcttactaggctgtgagaggctgtgctgcttgcacctataggaaacatcttgtgacgatgaggcaacaagttggaaaatgaaagcaggctgctgggaattcagagtcaagaatggaaagtccctgggtccgggatgaccttgttaatcttccagactcaccaagggactgccagttcttgtactttttattaggtaaaacagatatgtccttatatttaaaaccactgttcatcaggattcctgttacccatagccaaacacattctaacttagagaggaagggcatttacatgatcagcaagtgaaataaaatggagaggtgccagcaaaactaggtttttctgtgacactttgctttattgttgttgtttttacattatgatgtccatagcccttgtttcacaataaagcaaaaatttaaaagtcattattcatttccagaaaaccaaacttttataagacaaaaagctaactacaataaaaatataagggtcttgaaggattttattttcagaactttttttttttttttttccttgagacagggtctagctctgttgcccaggctggagaccagtggtgtcatctcagttcactgcagcctgcacctcctgggctcaagcgatactcccacctcagccccccaggtagctgggactacaggtgtgaactaccatacccagctaatttttgcattttttatggagacggagtctcaccatgttggccaggctggtctcaaactcctgggctcaagtgattctcccaccttgacctcccaaagtgttaagattacaggcgtgagccaccatgcctggcctatattcagaacttttcaaaatactattctgtttgcctctgttgcttgctaatagtgtttaaccttatggatgcaacggtaagatcctgtttggtcaaaccttcagtcaaatctcttcagtttttaaaaggacggttttttgttccccacaaattaaagacccactaggacaggagacagtccattcaaaaactatgtgactgttgacaaactgtaaatccattcttctgccagaggagagcactgggccttaagcaatggttctactgttgaccacactgacttcctgttagacatgtttttgttgctcttccctgtttttcttaacctgtaaatagttttctctatcccactcatttgggtcccagtgccactggccaatccaggtcttcagcttttcttgtcgactaacagtggccccccaattggtcctctgccacccatctttgcttcccatccaaactctctcctacacaacaagccctttctaaacacaagtctgggaaatttccactcctgggaaaatggactagacatacttttccatgttcctctcaccaagtatggctaaaaatcctgaatattatatgtaaaacaagcagaagaagactgaaaggcaaactggctatggacttcaggacccaaggactgacacaggaatgactccctgtgtttcatttttgcctcatatatcccagaagccagcaatctgtacacatcaacaagcacagacaaaaacagccaccagcaaaagcctcttatgtataactaaaggtccaagaaaggaggcagtctaccaagacagaaaacctttagacagtaactgctctactccagccagacaacagagaagaatctgcagcctacccccatccactcaagcaaaggcttctgatgaaaatgccagtgggctgtgatgtgattagttaggcaggacaccagggtaggcttatcataatctgggcacacagaattgcagtcatttggcacaccttttcaacaaagtgaaaaacaggaattgctttatagtaccgtgggaaagagtaccgcctggcgatgaaacgagcaaaacatctagaggctgtgctgctgagcctgctggtggaagtcaaatcagtgttggttcttaaaagttcactacccaggccctgcctggggagtgaagtagggagtgtacagtcaggagaagggactgatggaatgtgcgggtctgttcccgatggaagctaggcttatcttcccttggagggaagaatccgtatgtaatatgtcagccagtgtgggactcagggaagtccaaggtcattgggtttctggagggaaaaaagaatagaggaaaaggtataggcagagatgatgtttctttggtcctcacaacccgacgtctagggaggtgagggcctgtattagtcttatgtgacagatgggacagcagaggcacagagaagtcagatggcagcagagattagaggtaaagccggtgtgctcatgtgatcacttgcttatgtgagcagaagtagttctgcttgtcatcttgctatagcccatttgaaggcagaaggaggataattgcccactacaccaaaattgcattccgccaaacttgccaccaagagctcaacagtcgccacgatgctgagcacggaaggcagggaggggttcgtggtgaaggtccagggcctatcctggtcctgctcagctgatgaagtgatgcacttctctgattgcaaaatacaaaatggcacatcaggtatttgtttcatctacaccggagaaggcagaccaagtggtgaagcatttgttgaacttgaatctgcagatgaagcgaaattggctttaaagacagagaaaccatgggacacagatacgttgaagtattcaagtctaatagtgttgaaatggattgggtatcgaagcacacaggtctgaatagtcctgatactgccaacgatggcttcgtctggcttagaggacttccatttggctgtccaaggaagagattgttcatttcttttcagggttggaaattgtgccaaatgggataacactgtgagtggactttcagggcagaagcacaggggaagcctttgtgcagttggcttcgcaggagatagctgagacggcattgaagaaacacagggaaagaatagggcacaggtacattgaaatcttctagaatagccaagctgaagttcatacctactatgatccctctcagaagctcatggctgtgcagtggccaggtcccagtgataggccaggggctggctgaggtgtaatagcattggcagaggagctgggtttgaaaagatgaggcagggtccctatggtggagggtatagaggctatgatgactatcgtggctgtaatgatggatatggctttaggtctgatagatttggaaaagaccgcaattactgtttttcaggaatgtctgatcatagatacggagatagtgggtccagtttccagagcaccacagggcactgtgtacacacgaggggtttaccttacagagccactaagaatgttataatttctattcacctcttaacctcatgagagtacatattgaaattggacacgatgacagagtttactggtagggcagatgttgagtttgctgctcacgaagatgcagtggcagctatggcaaaagacaaagctaatatgcagcacaggtacagggagacctttttaaatgctataggaacaagtaggggggtttatgaacacacctatgtagaacttttcttgaatctacagcaggggcaagtggtggtgcttatggtaggcaaatgatgggagagatgggcttacccaaccagtctagttatgcagctgagtggtggttgtggaggtggttatggtggtctgagtagtgtgagtggtggttatggaggtggttatggaggtcagagcagctgagtcgtggttatggaggtggttagggtgatcagagcattgtgagtggtggttatggaggtggttatggaggtcagagcagctgagtggtcgttgtggaggcggttagggtgatcagagtagtgtgagtggtggttatggaggtggttatggtgatcagagcagtgtgagtggtggttatggaggtggttatggaggtcagagcagctgagtggtggttatggaggtggttatggaggtctgagcagtgtgagtggtggttatggaggtggttatggtgatcagagcagtgtgagtggtggttatggaggtggttatggaggtcagagcagctgagtggtggttatggaggtggttagggtgatcagagcagtgtgagtggtggttatggaggtggttatggtgatcagagcaatgtgagtggtggttatggaggtggttagggtgatcagagcaatgtgagtggtggttatggaggtggttatggtgatcagagcaatgtgggtggtggttgtggaggtggttatggtggtcagagcagctgagtggtggttatggaggtggttatggaggtctgagcagctgagtggtggttatggaggtggttatggaggtctgagcagccgagtggtggttatggaggtggttatggaggtctgagcagtgtgagtggtggttatggaggtggttatggaggtctgagcagtgtgagtggtggttatggaggtggttatggtgatcagagcaatgtgagtggtggttgtggaggtggttatggtgatcagagcaatgtgagtggtggttatggagatcagagcagtgtgactggtggttatggaggtggttatggtggtcagagcagctgagtggtggttatggaggtggttatggtgatcagagcaatgtgagtggtggttatggaggtggttatggtgatcagagcaatgtgagtggtggttgtggaggtggttatggtgatcagagcagtgtgagtggtggttatggaggtggttatggtgatcagagcaatgtgagtggtggtattggaggtggttatggtggtcagagcagctgagtggtggttatggaggtggttatggtggtcagagcagtgtgagtggtggttgtggaggtggttatggtgatcagagcaatgtgagtggtggttatggaggtggttatggtgatcagagcaatgtgagtggtggttgtggaggtggttatggtgatcagagcaatgtgagtggtggttatggaggtggttatggtgatcagagcaatgtgagtggtggttgtggaggcggttatggtgatcagagctgttgagtggtggttatggaggtggttatggaggtcagagcagtgtgagtggtggttatggaggtggttatggaggtcagagcagtgtgagtggtggttatggaggtggttatggtgatcagagcaatgtgagtggtggttgtggaggtggttatggtgatcagagcaatgtgagtggtggttgtggaggtggttatggtgatcagagcaatgtgagtggtggttatggaggtggttatggtgatcagagcaatgtgagtggtggttatggaggtggttatggtgatcagagcaatgtgagtggtggttgtggaggcggttatggtgatcagagctgttgagtggtggttatggaggtggttatggaggtcagagcagtgtgagtggtggttatggaggtggttatggaggtcagagcagtgtgagtggtggttatggaggtggttatggtgatcagagcaatgtaagtggtggttgtcgaggcggttatggaggtcagagcagctgagtggtggttatgaggtggttatggtgatcagagcaatgtgagtggtggttgtggaggcggttatggaggtcagagcagctgagtggtggttatggaggtcagagcagtatgagtggtggttatggtggtcagagcagtgtgactggtggttatggaggtggttagggtgatcagagcagtatgaggggatatgaccacgttctggaggaaaactccagtgactgtcagtcaaagcttggttaggtagagaaggagcactaaagagctactccagatataaaagcagtgcacttatgggagttgaatagaatgggagggatgtctagtatatcccgtataatgggtaaatgagaaatataatttattctgatcactcttggtcagcttctctgtcgtctttctttttcctctttttttgagacagagtctaactctgtcgccaggttggagtgcagtggcacgatcttggctcactgcaactttgcctcccaggttcaagtgatttctcctgcctcagcctcccagtagctgggactataggcacgtgccaccacgcccagctaatttttgtattttatatatatatatatatatgtatttatactttaagttctagggtacatgtgcacaacgaacgtgcaggtttgttacatatgtatgcatgtgccatgttggtgtactacacccattaactcgacatttacattaggtatatctcctaatgctatcccgcccccctccccccaccccacaacaggccccagtgtgtgatgttcctcttcctgtgtccaagttcaattgttcaattcccacctatgagtgagaacatgtggtgtttggttttttgtccttgcgatagtttgctgagaatgatggtttccagcgtcatccatgtccctacaaaggacatgaactcatcattttttatgactgcatagtattccatggtgtatatatgccacattttcttaatccagtctatcattgttggacatttgggttggctccaggtctttgctattgtgagtagtgccgcaataaacatacgtgtgaatgtgtctttatagcaacatgatttatattcctttgggtatatacctagtaatgggatggctgggtcaaatggtatttctagttctagatccctgaggaatcgccacactgtcttccacaatggttgaactagtttacagtcccaccaacagtgtaaaagtgttcctatttctccacatcctctccagcacctgttgtttcctgactttttaatgattgccattcttactgatgtgagatgatatctcattgtgcttttgatttgcatttctctgatggccagtgatggtgagcattttttcatgtgtctgttggatgcataaatgtcttcttttggggagtgtctgttcatatccgttgcccactttttgatggggttgtttgtttttttcttgtaaatttgtttgagttctttgtagattctggatattagccctttgtcagatgagtagattgcaaaaattttctcccattttgtaggttgcctgttcagtctaatggtagttttttttgctgtgcagaagctctttaggttaattagatcccatctgtcaattttggcttttgttgccattgcttttggtgttttagtcatgaagtccttgcccatgcctatgtcctgaatggtattgcttaggttttcttctagggtttttatggttttgggtctaacatttaagtctttaatccatcttgaattaatttttgtataaggtgtaaggaagggttccagtttcagctttctacatatggctagccagttttcccagcaccatttattaaatagggaatcctttccccattgcttgtttttgtcaggtttctcaaagatcagatagttgtagatgtgtggtattatttctgagggctctgttctgttccattggtctatatctctgttttggtaccagtactatgctgttttggttactgtagtcttgtagtatagtttgaagtcagcgtgatgcctccagctttgttcttttggcttaggattgacttggcaatgtgggctcttttttggttccatgtgaactttaaagtagttttttccaattctgtgaagaaagtcattggtagcttgatggggatggcattgaatgtagaaattaccttgggcagtatagccattttcacgatattgattcttcccatccatgaccatggaatgttcttcaatttgtttgtgtcctcttttatttcgttgagcagtggtttgtagttctccttgaagaggtccttcacataccttgtaagttggattcctaggtattttattctctttgaagcaattgtgaatgggagttcactcatgattttgttctccgtttgtctgttattgatgtataagaatgctagtgatttttgcatattgattttgtatcctgagactttgccgaagttgcttatcagcttaaggagattttgggctgagatgatggggttttctagatacacaatcgtgtcatctgcaaacagggacaatttgacttcctcttttcctaattgaataccctttatttctttctcctgcctgatggccctggccagaacttccaacactatgttgaataggagtggtgagagagggcatccctgtcttgtgccagttttcaaagggaatgcttccaatttttgcccattcagtatgatattgggtgtgggtttgtcataaatagctcttattattttgagatacgtcccatcaatacctaatttattgagagtttttagcatgaagggctgttgaattttgtccaaggccttttctgcatctgttgagataatcatgtggtttttgtctttggttctgtttatatgctggattacatttattggtttgcgtatgttgaaccagccttgcatcccagggatgacgcccccttgatcacggtggataaacttttggatgtgctgctggattcagtttgccaggattttattgaggatttttgcatcaatgttcatcagggatattggtctaaaattctcttttttttgttgtgtctctgccaggctttggtatcaggatgatgctggcctcataaaatgagttagggaggattccctctttttctattgattggaatagtttcagaaggaatggtaccagctcctccttgtacctctggtagaatttggctgtgaatccgtctagtcctggactttttttggttggtaagctattaattattgcctcaatttcagagcctgttattggtctattcagagattcaacttctttgtggtttagtcttgggagggtgtatgtgtcctggaacttatccatttcttctagattttctagtttatttgtgtagaggtgtttatagtattctctgatggtagtttgtatttctgtgggatcggtggtgatatctcctttaacattttttattgcatctatttgattcttctctcttttcttttttagtagtcttgctagtggtctatcaattgtgatctttccagaaaaccagcttctggattcattgatttttttgaagggttttttgtgtctctgtctccttcagttctgctctgatcttagttatttcttgccttctgctagtttttgaatatgtttgctcttgcttctctagttcttttaattgtgatgttagggtatcaattttagatctttcctgctttctcttgtgggcatttagtgctataaatttctctctacacactgctttaaatgtgtcccagagattctggtatgttgtgtctttgttctcgttggtttcaaagaacatctttatttctgtcttcatttcattatgtacccagtagtcattcaggagcaggttgttcagtttccatgaagttgagtggttttgagtgagtttcttaatcctgagttctagtttgattgcactgtggtttgagagacagtttgttataatttctgttcttttacatttgctgaggagtgctttacttccaactatgtggtcagttttggaataggtgcgatgtggtgctgagaagaatgtatattctgttgatttggggtggagagttctgtaggtgtctattaggtccgcttggtgcagagctgaattcaattcctggatatccttgttaactttctgtctcgttgatctgtctaatgttgacagtggggtgttaaagtctcccattattattgtgtgggagtctaagtctctttgtaggtctctaaggacttggtttatgaatctgggtgctcctgtattgggtgcatatatatttaggatagttagctcttcttgttgaattgatccctttaccattatgtaatggccttctttgtctcttttgatctttgttggtttaaagtctgttttatcagagactaggattgcaatgcctgcctttttttgtattccacttgctgggtagatcttcctccatccctttattttgagcctatgtgtgtctctgcatgtgagatgggtttcctgaatacagcagactgatgggtcttgactctttatccaatttgccagtctgtgtcttttaattggagcatttagcccatttacatttaaggttaatattattatgtgtgaatttgatcctgtcactaggatgttcgctggttattttgctcattagttgatgcagtttcttcctggcatcgatggtctttacaatttggcatgtttttgcagtggctggtaccagttgttcctttctatgtttagtgcttccttcaggagctcttgtagggcaggcctggtggtgacaaaatctctcagcatttgcttgtttgtaaaggattttatttctccttcacttatgaagcttagtttggctggatatgaaattctgggttgaaaattcttttctttaaaaacgttgaatattggcccccactctcttctggcttgtagagtttctgctgagagatcagctgttagtctgatgggcttccctttgtgggtaacccgacctttctctctggctgcccttaacattttttccttcatttcaactttggtgaatctgacaattatgtgtcttggagttgctcttcttgaggagtatctttgtggcattctctgtatttcctgaatttgaatgttggcctgccttgctaggttggggaagttctcctggataatatcctgcagagtgttttccagcttggttccattctccctgtcactttcaggtacaccaatcagacgtagatttggtcttttcacatagtcccatatttcttggaggctttgtttctttttactcttttttctcttaacttctcttcttgcttcatttcattcatttgatcttcaatcactgataccctttcttccagttgatcgaatcggctactgaagcttgtgcattcgtcacgtagttcttgtgccatggttttcagctccatcaggtcctttaaggacttctctgcattagttattctagttagccattcgtctaatcttttttcatggtttttaacttctttgcgatgggttcagacttccttctttagctcggagaagtttgatcgtctgaagccttcttctctcaactcgtcaaagtcattctctgtccagctttgttccattgctggtgaggagctgtgttcctttggagatggagaggtgctctgatttttagaattttcagcttttctgctctgttttttccccatctttgtggttttatctacctttgttctttgatgacggtgacgtacaggtagggttttggagtggatgtcctttctgtttgttggttttctttctaacaggaccctcagctgcaggtctgttggagtttgctggaggtccactccagaccctgtttgcctgggaatcagcagtggaggctgcagaacagcgaatattgctgaacagcaaatgttgctgcctgatcgttcctctggaggtttcctctcagaggggtacctggccatgtgaggtgtcagtctgcccctactggggggtgcctcccagttaggctactcaggggtcagggacccactcgaggacgtggtctgtctgttgtcagatctcaaactctgtgctgggagaaccactgctctcttcaaagctgtcagacagggacatttaagtctgcagaggtttctgctgccttttgttcagctatgccctgcccccagaggtggagtctacagaggcaggcaggcctccttgagctgcagtgggctccatccagtccgagcttcctggctgctttgtttacctgctcaagcctcggcaatggcaggcgcccctcccctagcctcactgctgccttggagttcgatctcaggctgctgtgctagcagtgagcaaggctccatgggcgtggcaccctctgagccaggcacaggatataatctcctggtgtgctgtttgctaagaccattggaaaagcgcagtattagggtgggagtgaaccgattttccaggtgccgtctgtcacagctttgcttggctatgaaagtgaattccctgatcccttgcgcttcccaggtgaggcgatgcctggccctgcttcggctcacactcagtgctctgcacccactgtcctccacccactgtctgacaagccccagtgagatgaacccagtacctcagttggaaatgcagaaatcacccgtcttctgcatcgctaatgctgggagccgtagactggagctattcctatttggccatcttggatccgcctctcctaatttttgtatttttattagagatggggtttcaccgtgttggccaggatgatcttgatctcttgacctcatgatctgcatgcctcagcttcccaaagtgctgggattacaggcgtgagccaccatgcccagcctttcctttttaaagaaaacaaaagtttaacagttttgcattacaggcttgtgtcacatgcttactgtaacagtggaagattattttaaaacttcaagctcagtaattttgaacactgaaacattcatctaggacataacaaagttcagtattgatcataactattaaaacaattttcagctttcttcaagttagttatgttgtaggagtgtatctaagcagtaagcatatttaggttgatgcagtttcacttgtgttaaatgttgctcttgtaccccataaatacattgaaaagtttggatgctcatcaaatataggggctgtgtatgcgattcaaagtgaaaacatttggcatgtttgttaattctagctttttggtttaatatcctgtaaggcatgtgagtgtacacttgagtgtatacttttacttttttttaacatatgggacaattttaagatgtaatactaatactttaggagtttcgtcatgtcatttgtatggaattctgaggctttggtttaaatctttccttgtgatttccatttagaagtattgtactaagtgaaacttgttaaatcttcctttaaaaaaaaaaaaagaggtaaagcctcaacttccatgtagtaagctgctttctttgtccactccttgaaacacacacaacagaatttccatacatacatacaaaaacagaagcccttcactcttgtcgcccaggctggagtgcaatggcgcaatcttggcccactgcaacctccatctcctgggttcaagctattctcctgcctcagcctcccaagtagctgggattacaggcatgcgccaccacgcctggctaattttgtattttttgtagagacggggtctctccatgttggtcaggctggtctcgaactcccaacctcaggtgatctgcccacctcggccttcaaaagtgctgggattacaggcgtgagccaccatgcctggccggaagccattttttttaaagatgaggtttcactgttggccagactggagtgcagtggtgcaatcagagctcactgcagcctcgaacccctgggattaagcagtcctaccttagcctcctgagtagctgggactataggcaaataccacaacacctggcttttttttttttttttttttttttcgagatagggtcttgctctgtcgcccaggctggagtgcagtggtgccatcacaacatactgcatcctctgccttctgggctcaagtgatcctcccacctcagcctctcagtaactgggactacaggcgcacaccaccatgcctggcttttttttctttctttctttctttctttttttttttttttttttttttttggagagatagagcttccctgtattgctgctggctgaggttttaaaaaattgtttataggctgggcagggtggctcacacctgtattcccagcacttcaggaggccgcggaggtgggcagattgtctgaggttgggaggttgagaccagcctggtcatcatggtgaaaccccatctacttaaaatacaaaaattagctgggtgtggcagtgcacgtctgtagtcccagctcctagggaggctgaggcacaagaatcacttcaacctgggaggcggaggttacagtgagctgagattgcaccactgcactccagcctgggtgatagagtgagactcagtctcaagaaaaaaaaaaaaaaaattttatacagacagggtcttgctttgctgcccaggctggtcttgaactcctggcttcaagggatcctcccgcctcagcctcccaaagcaccgggattacaggtgttagccactacaaatgcgtagcagcataaaggcacaactaactacagagaatgtaatctaaagtatgtttaagctcatcagatttatatgataaagtaaggtcccttatttggggcatccatattttatgcccataaaccattgaactgaataacaagtctctttctcagtaggaaaaaccttagatacaaggcagggagattttgttcttgttctctaggaaaaagtgagagaaaagcagctgtgtatagcactttctaactgtaaaggtcacacttgggctgacggggtgggtgatcctctggcaagaaggggaatgagcacaggttctctcctaaaatccccactgaaatgactcatagaatatacaaattgctggggaaaagtccacattcaagctggaaatgttgggtaccattcaaataccaaaaatgtgggagattttgagattctaccatagcactgatgtgtgactattaacagtaacaatgactcatggatgagatcatgaagtgatattcctttattgcccaataggtcattaaatttgcttcatgggcttgtttttccttcgtccctggatcaaatgctggtcccatgacttttttttttttttttttttgaaacagggtctcactctgtcaccaggctggagtgcagtggcatgatcgtggctcactgcaacctcgaactcctgggctcaggtgatcctcgggcctcagcctcccaagtagctgggactataggcatgtgctatcacgcccagcttggtcccgtgaccttttaaaaaatatatgttctttagtaataaaaagtcttataatcactttaagttagaacacaggctcaattcactatccaaaatgctcccatgtgagaagcaaaactctgaaagtgatttaaagtcaaaacttcatcacaggcctctagcaggccagcagcctacagagggagaaagatgttggcagctggcaggtgccttctctagcgtcttgccttctgctgctgctgctcatctttgagcatgctaaccatggtttctcaaatctccagggattggcctggagaggaagcaggtgtggggttatatttatattgctcacagtggtggcatgtgggtggaatacagggaaatcttacatattgtcttgcctgacagttgctttaagtggactccttctcatggttttggagaccaccccatcactgagaatttgtgtctcctagagttcagtctaaaagccgagatcctacattgtgttccagggaagcttaagaaaattaggtctctgcttgatttggaaagcttagactgaacctaaatgaaaatcaggtcagtaaaaagtcagagtttaacaaagatagatgttatgtcccagagaccagacatttaagcattactttcaaagtgcactcagagagatatttgttcttcatttagtacttagagactaagtcttatccatgccatcaaaaaaatgggagttggaaaacatgccacacatgttaacaatgcattgattttttttttttttttttgagacagagtctcgcacgtcaccaagactggagtgcagtgacgcaatcttggcttactgcaagctctgcctcctgggttcatgccattctcctgcctcagcctcccgagtagctgggactacaggcgcctgccaccacacccagctaattttttgtatttttagtggagatggggttttgctgtgtcagccaggatggtctcgatcgcctgaccttgtgatccacccacctcggcctcccaaagtgctcggattacaggcgtgagccaccgcgcctggccaacaatgcattttaacttaaaccatgtaaatgaattcagatgaagaaccagaaaattactggagctactgcatcaccacactagtaatgtgttgtctctaatttccattaattctctaaagtggagtggcatttaaagacacctggaaaccaatctgatcccttaaatgtttaataattgtcccactcttaaatatgttttgtccacatctaactgaacagtgatcatttttagtggctcacctctagtgtaccaacatatagctgactagttcctcaaactaaatatctttagcatgaaaatgaagttttattttatgcgattttatctaatttctcaccagagggtaaatgcagatgtaagctggcacgagaggagggtgatgcaggccaagatggattgagtcctgggagttgcctgagatgggacataggttcccagaaatactgtgatatcaatactgttctcagtggaccacaatctggcatggacctgggtggtatgcgaggccactcctcctgtgtacctattttggctgctccgagtagatgtacagtgtggagtgcagcccctgggttgtgctggcccagagattcagccagccaagatccttatgcttgctcacagccctcagtggtctgggctactctttagtagcttgagtagcccttgagagtcattcttggaactgtgcacctgaaatcaatcttactccatgacaaatcctgggatatgaactagaagttggcagtttaataatgacagatcccacccttacatagaatgcagtgaccatgtttgtttttttttttctcgtggagtagtaatggggaagaggtggtgtccatttccataaaggaggcaggatgttgcaggaagtcctcatgaaaggatcttatggagggctctgccggactctcaatatgggacaacccttctcttttggcctcctgggtccccagcaagtctgagtctttcactagactaggttgggaagaatgagctgggccattgtgaagggaaactccaggaagctgggtcttcactgaggctacaaagcaaatgccatctaaggggcagatggaccaaggtcagggcatagaagcaatgtcaagctttaggtccaagagtgatgaccagagtcgtgtaagagatgggacagcaggccaatcaggatttgaggagatagggataagttgggaagttgtgtagggacagaaggaggaagaaagtttcaaatcttgggctccaattagataaggctgggcccaattcttttgggtgtgaaaaatgtgggagagggagtggcagctgtttaaaggcacggagctacacaggtttaacagcaatacacttgacccttgaacaacatgggtttgaactgcatgggtccacttctatgtagattttcttctgcctccacccccgccccccaccccccagacagcaagatcaacctctcttcctcagcctactcaccataaagatgaggaggatgaagacctttatgatgatccacttctgcttaatgaatagtaaatataatttctcttccttgattttcttatttttttcttttctctagcttactttaagaacacaatattcataaaaaatatgtgctaatcaactttgttattgtcttctctgtgatgtacaaactttatgttattgccggtcaacagcaggctattagtggttaagtttttggggagtcaaaagttacagtcagatttcttttcttgtttttttttttttctaaatgttttattggattttttttttttttttttttttttttgagacaaggtctcactctgttacccaggcaggagtgcagtggcgcgatctcagctcactgcaacctttgcctcccaggctcaagcgattctcctgcctcagtctcctgagtaactgggactgcaggtgcttgccaccatgcctggctaattttttgtttgttttgagatggagtctcgctctgttccccagactggagtgcagagtgcagtggcaggatctcagctcactgcagtctccacctcctgggttcaagtgttttttttgttttgttttttgtttgtttgtttgtttgtttttgacactgagtcccactctgtcgcccaggctggagtgcagtggcgagatctcagctcactgcagctgccgcctcccgggttcaagcgattcttctgcctcagcctcccaagtagctgggactacaggtgcgtgccaccacgcctagctaatttttgtatttttagtaaagacagagtttcaccatattggccaggctggtctccaattcctgacctcatgatccacctgcctcagcctcccaaagtcctgggattataggcgtgagccactgggccctgccaatttttgtatttttagtagagatggggtttcaccatgttggccaggctgatctcgatttcccgacctcagatgatccgcccacctcggcctcccaaagtgttgggattacaggcgtgagccatggtgctgggcatatacgcagatttctgactgtgaagggaccagcacccctgacactgcatcattcaggggtcaactgtacattcatatcccccttactacctactagctctatgtgtgaccttggtcaagtcactgtctttgcttacagcaggaataaagcatttgacttagtagctagcaacatggaggatctgctcaatgatgccgactccctttgccctttatggacgtaatcaactcatgattacctgcgacacatgcccactttatccctttgtttaacagaacacttttgttctgaaccaagctcctcctttcctttccagtagttaatgtgttctttgaggatgcaatctaatcgtaattttgcccgaagtggggaaaaaaattaagctcacattgaaaccttaatatagctctataatcattttctcttttagcctagatcacttcattttggcaatttaagtactacttttggtcctattaacaataccactcttgcaaaggacaggttacaaccaattctcagattcctgcctggataagatttgtgaccccaaattttaaaaaagcagaaaaaaaccccacaaaccacaggcaggaagaaagaaaaacaagagaatgtagctaaggtaattccattaatgatcagtttatgtcaaagcatgtggaaataatgccttataggaggatatttagcaacaacgatttttttaaactcattttctcctgtaggtacagaattgcaagttttttctgacttcaaatgtgtatagctgactgcgtgtgtgtgtgtgtgtgtgtgtgtgtgtgtgtgtgtgtgtgtgtgtcagggtctccttctcttgcccagactggagtaaggtgacataatcatagctcattgcagccatgaactcttgggctcaagtgatcctcctgccttcagcctcctggcgtagctaggactgcaggcacatgctaccacacccagctactgttttttggtagagacagagtcttgctatgttgcctaagctggtctcaaactcctggcctcaagcaatcttcccacctcagcctctcaaagagctgggattacaagcatgaaccactgcacctggccccatacctgactacatttctcagcttcctttgtggctaggctgtgctaggtagccttgtacctaaattttgaccagtgagcagcaagtggaatttgttggatgaatctaccacaaaggatccttacaatggagatagtggggccaggcatggtggctcatgcctgtaatcccagcactttgggaggctgaggcaggcagatcacttcagtctaggagttcgagaccagcctggccaacatggtgaaaccccatctccactaaaaatacaaaaattagccaggcatggtggcacgcacctgtaatcccagctactcaggaggctaaggcaggagaatcacttgaactcaggaggtggaggttgcagtgagccgagatcgcaccactgcactccagcccagcaacaaagcaagactcttgattcggaaagaaaaaataaaaaaaggttgggggagacagtgggagcccagacttttgtccttccccttgcctagaagggagatgaggttgctggtgctgtggaagctattatggaccatgaggcagctttgaagacagaaagcctgcatccttgatgactcaatggaatttcatcccaacccaggactgactgccccagatctttgttacatgagggaatacactcttctgtgtttaagaaactgtggttggatctgttactggaatatgaatgcagttaataactggctcaaaatgacttcatctcaacccacattggttgcttcttccaaacaatatataggtctgtactgtggtgggtctcaggatggctgtgatgtagccttaggaagtttatctatgggaaatccatattcatggtgtcctgatgttgcagaggacatcctgagctggctggagtaacttgggacacaggtcaatcgactgtaatctaacttctgaggccattcagtaccctctacagtggccacctaaaaaaaaggcagccaggtgtggtggctcaagcctatatagatcccagaactttggaaggctgaggtgggaggatcacttgagccaaggagtttgaggccagcctgggcaacatgaagaaactctgtttctacaaaaaataaaaaaaattagccaggcatggtggtatgcacctgtagttccagcttcttgggaggctgaggtggaagaatgacatgagcccagcaagtcgctgcaatcagccgtgatcacgccgctgcactccagcctgggcgacaaaaagaaaaagaaaacggagcctgttcactgggtgtggtagacaaggtaaacttttctttacctcccatatcccacaaccttggatgtgctcacagtcatggtagtgttttgtaatgatgtagctgatgacaggtgtgatgttggagattcttctacctgactgctgctatcagtcctaccagcccccaacgtttggtgcttgttctaaagggcatgtcctaggagtcgctttaaactctcaaagtatcactctctatacaaacaagaagtgcaagtaagtagcctgagctcagcctcccaataggaatatttcattatcactagatcaagtctttccattacaatgactgatctgtctctgaatcctgtggattcatccttcaaaatgcccttttcttccagttctcatagctagtgccctaaaagtgacctgcagtacctcctgctgagacgaatgtaccagcttcctaactagcctgcactcccttcatccccccaagtcagtgccagaccaccttgcctgaaaaaccactttcagtgtgtctcacctcagcagaaatgtttctcagcttccaattaacaatcacatcaaacccctgctcttgtctgcgttttaagggtatctataggccgggcgccgtggctcctacctgtaatcccagcactttggaaggccgaggcgggcagatcacttgaggtcaggcgttcgagaccatcctgaccaacatagtgaaaccccgtctctaccaaaaatacaaaaaaaaaaaaaatagtggggcgtggaggtgcacgcctgtaattccagctactcgggaggctgaggcaggagaatcgcttgaacccgggaggcagaggttccagtgagccgacatcgcgacacagtactccagcctgagcgacagagcgaggctgtgtctcaaaaataaataaataataaattaaaaaaataagagtatctataacctggtcccagcctgaatttcctttttcaccccaacacgtagccctagttacattcttctgacgtctgtaaacaagcccagcccttcctgttgtgaagccaagttcaggtggttcctcttcgcctgactgttttcccattccacttaccggaagcctagtcatccttcggagggctgtacgggggttgcaagaagcaacggaaacggttcagcacctgctaccttccatcatattcttttcaataaaggggcaactcccgccaatggcagtgtagatttcctaacctctacacatggaagattcacaccattcaggattgttgtttaactgttgagagagcacttgatacttaacagcttactaggctacaagacagcgcaggaaagaatcctctgttgtccttttatgttatcctgaacagttggttcacagagttactgtaaacacacaaaacatgactgccagggcttagtagtgaggaaggtgggaactagtcctgactcagttaactgtgcccaggagaagctgcttaacctcaaaggatttcactattactagaatcaataataccaaccctaggggtaaaaataaagataaatgtgtgcaaatcctgcctgcagtctcgggcacgtcgtgggtgtccaagaactgttcttaggcagccggtggggacaaagtctgtgtgcctcctgtcctggaataggtcccaaggtcggcttacttgcaaagcaagggtacggcgcaagagtactgaatacgggttggaagggcgctggctctaccctcagctcataggccggctgggcggcgctgaccagcagctaggccccgtcttccctaggaacggccacgggggccctgggagggtatgaatgtctttttgcagtgaggcctctggaccccgcggccccccggcagcgcaaccaaaactcaggggcaggcgccgcagccgcctagtgcagccagatccccgccggcaccctcaggggcggagccggaggcagggccttcgggccgtaccaactccacgggggcaggggccgcctcccttcggccgcgcgccactcaagtacggcagacaggcagcgaggttgccgaggccgaggctagcctgcagcctcctttctcccgtgccctgggcgcggggtgtacggcaagcgcgggcgggcgggacaggcacgcagggcacccccggggttgggcgcggcgggcgcggggcggggcccgcggggggggggggcggggcggcggtgcccttgcggcgcagctggggtcgcggccctgctccccgcgctttcttaaggcccgcgggcggcgcaggagcggcactcgtggctgtggtggcttcggcagcggcttcagcagatcggcggcatcagcggtagcaccagcactagcagcatgttgagccgggcagtgtgcgggtgagaagaaaggggacccggtcacggccccaagggcgaaggggctcgcggcgggcagggcctccgcggcaatggcgacagtggccgcaccgggcctggcgggaccggggcacctgcaggcggttctcccgggagtgcccggcgcggcggctggagcggggatccgcagggaggggacgcggggactcgggggacgccgcgcgctgccgttcctcggcagcccagcctgcgtagacggtcccgcggcgctgactgaccgggctgtgctttctcgtcttcagcaccagcaggcagctggctccggttttggggtatctgggctccaggcagaagcacagcctccccgacctgccctacgactacggcgccctggaacctcacatcaacgcgcagatcatgcagctgcaccacagcaagcaccacgcggcctacgtgaacaacctgaacgtcaccgaggagaagtaccaggaggcgttggccaagggtaggttccaggctgagcggcgggaggcagtccccggcagaggcgaccccagggagccaggccccatacggacgggcctctccgtggaggagaactcgcttcgtatttgtaccggttccgagttttccaggcacgatagtctctcttttaaacacatggtctacctcattgtagaaggagtgcctcgatgggtttgaacacacttctgtcatctcagggaacttggggtcctgcgaaggagcttgccttactgttgtgagccacattccgttacacatattgccagcactggtgaattgtagggcctgaaaagaaagctctactgtgtcactcgttttttttgcaaattgaaattgttcttgttgtataatgtgctttggggaaatgtttggtctctcaggtaggtgtgccagccgtttgcaggagggctgagagcgcctgtccactggtggccagacatcatcgggtccgcaggtgtctctgagtgtcagggtcacctcctgatagaagtgggagtggtgtcttactgccaggtcacactgaaggtgggagacaggaggacactactccgtgctaggaaccatggtccttgtcatcttcctgagagcaaacggggtcgggactccagcctaggacttggagactccctgcatccccagctaccctgcaggtgaaacttcactgagcccacttgacttcaggtgggagaggaggaggcacaccgttgtggtgtgcgttaccaaaaaagcagtaacctaactgtggaacagttcaggatctttagacttgatacttttcttgatttcccttaggggtcaaagttcacaaggaaaatagccctttagtgggaaactgaaacaggcttgtttttatttactatttactcatatttgtaatgcaattaaaatatatgttgttaactttttttttttttctcaagagctcggttgataaaaccaggggtatgtggactttttgagtctgtgccttttgggggtgtgtatgggaatgttatgttttaacgttttttacaaaatagtattgtctttttaatttattcgttagtggtttgcacaaggaagataatcgatagtcatgttttttagactctctgtattgcttggtaagctacgtagtaaaaaatgtttacttttccttaaatgttttgaatttcggggttatgaaatttgttgagtaatttttagacagtcacatcttgttgactggaggcatctagtggaaaaatgcagtatttcagcctgattgtgtttgaagtaaatgattaaaagaggaggaagttaccacattctggaagatttacttgagacagacgaaccttgaattacgggaaaaggccccgtgatttaggaaataacaaatttgggaaacatgtaatggggagagactggggaataccccagttgtgaaagtacttcctgtaaggcaacatctgacaccaggaacctttctcttcagtattttaaaaacaacttaatttcagtcctttacttgtggaatcagagccttacttatgtaatacaacccactggaaaaaagctttttattgtattgtactatattgtttataagtgattgagtacctgcagagctttcttttacttaaacatattttaaaaattattaaaaagattttcatgtttgaaaacttggggaaaaaagataaaacaatgtcataatctcatcacatttaactgactaatatgaatatttttcaacaaaaagcatttgacttttattattatttgaggcaaaaactaaactgaaaccaaataaaatgttgaatttcagaaaagtgttcttaaaagcagatattaagccctcaatttttattaattttaaaatgagtaagcaaactgtaagatgttaagattattaaattatctctcattaagcatgtatctttcccattttaaaaattcagttactattgatttattaaaaaacaatagaaaagttacatctatttttagagtgactctcaagaaaatttaataagggaaacacagatctataaaaaactgtttgtaaacctaacaaaggaaaaaaaaagttggtgtctttaaaaaaccctttgagattagctgtgtattcagatatcagttggttctctcctttctgaatcgctaaacaactggagcttgtttcagaaagcagcattgtctacgtatgttccttttaaaaattttttttttaattctgtctaaaaaaaacagacggggtcacactatgttgcccaggctgctcttgaattcctgggctcccctatccacgcacctcggccttccagagtgctgggattacaggtgtgagccaccgtgcctagtcagacatacttttttttttttttttttttttgacggaatctcagtctgtcccgcaggttggagtgcagtgatgtgatctcggctcactacaacctccgtctcctgggttcaagcaattctcctgcctcagcctcctgagtagctgggattacaggcgtacgccaccacgcctggctactttttgtgggttttttagtagagacagggtttttccatgtcgtccaggctggtctggaactcctgacctcaagtgatccgcccatctcagcctcccaaagtgctgggattacaggcgtgagccacctcacctggccttgtatgtatgtttttttctttctctttctttttttttttctgtgacggagtattgccctgtcgcccaggctggagtgcagtggcgtgttcttggttcactgcaacctctgcctcctgggttcaagccattctcctgcctcatgctcctgagtagctgggattataggcacgcgccaccatacctggctaatttctgtatttttagtgaagacagggtttcaccatgttggccaggccggtcttgaaatcctgacctgaagagagctgcccgcctcggcttcccaaagtgctgagattacaggcgtgagccaccgcacccggcccagacatatgttcttaacgtacactttcagaacagcagttgagaactttttccaaaatgtaagctccttgagagcaaagctctcagtgggtctctgtgtcctttactttgcttctcttggtatcttgtggataatatgcacaaaatatttattaaacaagaggatttccatttttttctaatattaatagttcatttagtctgtagcttcttgaaggcatagaaaagactattttattttgcctacttatttggcaaggtacccatgcagtatgccaggagttacagggcctattgagaaggagtaaagggtctgggaggggtggcagggagttgctaattcatgtatggtggctagagaaggcttcactgatggggttgatgtttcagtggagacttgaaggaggaacaggaacgcagcatgagactgtcttggggaagagtgttcagcagaggcagcagtgctcagctagccttgaggggaacatccaagttggtcatgtgagtgcaaaaaggccagtgaggctgcagctgcgtgagcacgtgctcaatgacggggtcaagtgcagcgcctcttggtagtaagagtagctgagtgtaaacacctagggttcgctccagtgagaaggggagcctttggagggggcaaggcccacccccaccccccaaaactgaggggatagtggcaccagtgcagtgagaaatactggtcctctgtcccaatgaggtggcagtagagttagggagaagggattaggttctgcttgtgttttatttttttcttttatttttctctgtgtgcttttatatagattggatgtattttaaaggtagagctggctttgctaatggatatgctggtggattggatgtggggtgaagggagaggagtcaaaaatgacatcaggttcccaaggatgtcctgagggacagagctggcatttactgagacgtggaggacaataggaggagtaagtttggggtagaacatcaggagttcaattttgagtatgttgagtttcttgttaatgtgacttggagatatttcccaatgaatcgtcgtctgtcttgaaagtgagagttgaaggttttctgtacagtctgtatgttgagccatacattttagcattctattattttgattgtcctctttggtgtttcatttcctaaaatctcttctatctaagagatccctgagcctagcagccaggagtgaattttctagcttttccacctctgctaggtccttcatcagttgttcagcatgtctgggacaaataattttggggcgggggggtgctgaattttaggacaaacggatgttatagataagctggtcccattatctaatagcttacaaagaaaaaaatataatgtatacagtggttgaaaaagtaggagttacaaaaaaatgtgtttgcattttaacttttcaggagatgttacagcccagatagctcttcagcctgcactgaagttcaatggtggtggtcatatcaatcatagcattttctggacaaacctcagccctaacggtggtggagaacccaaaggttggtatatattggtgcacccttatctacattttgtgcacagtaggaatcgattgttgatttactgaagttaccttatacttgttttttgttttttttgttgttgtttttttgagacaagagttttgctcttgttgcccaggctggagtacagtggcgcagtcttggctcactgcaacctccgcttcctgggttcaagtgattctcctgcctcagcctcccaagtagctgggattacaggcgcccgccaccacgcctggctaatttttgcatttttagtagagatgaggtttcattcaccatgttggccaggctggtcttgaactcctgacctcatgatctgcccaccttggcctcccaaagtgctgggattacaggcatgagccaccgtgcctggcctaagttaccttattcttaccagaggtatcatagtggcatatttttcataacaacgagtatgataaaagttgtaactttcaaaaggacacaagtaggaatggagaatgctttcatggggttatgtcataagattttatgttcacgccaacatagaatatcacatcaactccaccttctggtttctggatggtacttcatattagggaaagactgagagacttcattttatgaactttttttttttgagacggagtcttacagtcgcccaggctggagcgcagtggtgcaatgtcggctcattgcaacctccgcctttcaggttcatgcaattcttgtgtctcagccacccaagtagctgggattacaggcatgtggcatcactcccggctaatttttatatttttggtagagacagggtttcaccatgttggcggggctggtctcgaactcctggcctcaagtgatccacccaccttggcctcccaaagtgctgtggtatggatgtgagccaccgcgccagtctagaaaagatgaactttctgtctactagtttctagggcctggattagatagttaaccgtctgtaccttttttcatctatgtgatacagggataacaatggtgttgttttgagaattaaattatagtgtcatttgctatttttcactctttcctaactgataaaaagtcagttgttccaggaaattaggttttctgggtatttttaaaaagtgttcagggaatgaggagagtacagggctagatggtcttgttcgctatcactgtttccttgacttcctgtgtagcttgtggaggcccagatgactttaattatcttcttcacccagggagggcatgaggcgtaaatgtagttcttgtctcttgtttctgggctccggatatgcaccctaagtttctgtggttttattgttcatttttaatcagtgttatggaaggcagcctatcttatgcacttgaaataagcaatttcattttaaggtaatgatgaatgaggagagtaagcttgggaaactgggcaactttttctttatttttgtttttatttattattattttggagatggagtttagctctttcgcccaggctacagtgaagtggcttgatcttggctcactgcagcctctgcccatcccgggttcaagtgattctctgcctcagcctcccgagtagctgggattataggtgcctgccaccatgcccggctaatttttttgtatttttagtagagaggagtttctccatgttggtcaggctggttttgaactcctgacctcaggtgatccacctgtctcggcctcccaaagtactaagattacaggtgtgagccaccgtgcctggccaacttattttttttctgagttcagtcttctagactatcggttaatacttttgaagttttgtcagttaccagaatatcagatatattcatatgcaaccagtggttttggtatgctgccatttttgtttaatctgtaccacattccatcatttgtgcttataaagatgattacttttaaacccgtagaataagagaagtgagattttgacccagttgatttagttgatgtgactaatctagaattatattctgtattactacagaataaaaggattacagctcttaaagtatacccttagttcagtcgtagagaaaactgcccatcaagacaggaagagctgggctgccttggagaagaacaatgactttattcccaaatggaggcgtagaagaaggagggtagaagtcaaaggaaaattttctattcagggaaaagaaaaagctaacagaaagtagtatttctttcctaacaaagatagtacagtgagtggggaaatccctctaacacgattcattaaaaaatgtgaactacgcagctggaggccattatcctaagcgaattaacccaggaacagaaaaccaaataccacatgtctcacttgcaagtggaagctaaacatggagtacttatggatataaaaatggcagcaacagacactgaggacagagcagggagggagaaagaaggggacggggggtgaaaactgttgtatactaagctcgctacctgggtgatggcatcaattgcaccccagacctcagcatcatatgatacccgtgtaacaaacctgtgcgtgtaccctctgaatttaaaataaaatttgaaccgggcacggtggctcacgcctgtattcccagcactttgggaggccaaggcgggtggatcacctgaggttgggagtttgagaccagcctgaccaacatggagaaaccctgtctctactaaaaacacaaaattagccgggcgtgatggcacgtgcctgtaatcgcagctgctcgggaggctaaggcaggagaattgcttgaacctgggaggcagaggttgcagtgacccgagatcatggcattgcactccagcctgggcaacaagagtgaaactccgtctcaaaaggtaaaaaatgaaaaaaaaaaaaaaaaaaaaaaaaagttgaagttataaaaaacaaaaacgtgaattaaaattgtgaaacttagatccaggtgtcgcattctgatgttgtctaatttcttgggccctatgacaaaaatattttaatacatgtaatataacattttactgtaattattgaaatctgttcatttgtgggtggttttggattttttttttaataggggagttgctggaagccatcaaacgtgactttggttcctttgacaagtttaaggagaagctgacggctgcatctgttggtgtccaaggctcaggttggggttggcttggtttcaataaggaacggggacacttacaaattgctgcttgtccaaatcaggatccactgcaaggaacaacaggttagatttaaaaattgtgatttcatttgggagagatgctctactgtaaagcattcaactagaaataaggaaaactaacagtgttttaagaacatgtaataatttgcaaatcttaacagataacacccagagtcttgtgtaagtaaaaatgttttagaagtcctgatatttcataaaattaagtacacgtaattttataggtacattaacaaacatgttttatttttatttattttttttgagacagatctcactgttgcccaggctggagtgcagtggtgcgatctcggttcactgcaacctccgcctcctgggttcaagtgattctcctgcctcagcctcccaaatagctgggattacaggcacataccaccatgcccagctaatttttgtgtttttagtacagacagggtttcaccatgttggccaggctggtcttgaactcctgacctcaggtatctgcctgcctcggcctcctgaagtgctgggattacaggcatgagccaccatgcccagccaaatgttttacttattaaccctgcttcattctacagagaattaatatcagcttagataattatatgtactaaaataaaaaaaaaattagctatagaacaagagtgaggaaaagaaatacaagcagagactgatttcagagcttgtactgttacctcctctgctgagcatttgaggttaaactgggactagatctcaggtttccagaccttctgcctttctggggctctttggtagagtatatgaaaatattcggcttggaagtgccaggctgggctcaccaaatactttgctgttgagcctaattggatttaaaaaatgtcactgaagagtatgggaaatagagccatgagttgtctggcagagggttgggactttgaacttaaagtgataccttcacatcaacaacagtcattctctgccccttcttctacccctgacattggaatactcttgatctgtggctcacttcacaggatagacccagattttggcagaatctgaacagctcttttgggacagtgacatggcataacaatttgtaaaagccacaaaaaatttgtaagcaccgatctgtagagtcaggttatttgtagagctgcatgaccagaaaggctgatatttgtaagtgagtcccagctacactccttcctctccctgtggaaagcacattagaaggaaaatgagggaatgtcatggccttttgtttataaaaatcattaataaattttgctacttgaaattattaataataaattactagtgacctccctcacaactgatcaagacatactggttaagaattgtttttgtagagagagctataatttattttgagtgtttttgtgtgtgcgtgatggagtctcactctgttgcccaggctggagtgcagtggcgcaatcttggctcactacaacttccgcctcccaggttcaagcaattctcctgcgtcagcttcctgagtagctgggattacaggcgcctgccacctcgccaggctaattttttgtatttttagtagaggcggggtttcaccatgttggccaggctggtctcgaacgcctgacctcaagagatctgcctgcctcggcctcccaaagtgctgggattacaggcctgagccactgcgcccagaccaaaagtttttttaaatggatgttttacagatagaactaaattcttcatttacctcacttaatttctgaaaacactgtgtcctccaactgctctgtattcccaaagattaaaattagccttggggagcagagctggttcctcgtaaacccctgtgagtgcccagaccctttggaggaggttctcagtgggcttttgcctgctcccacagatgtaacccacccttcctgctgctcctaagaccaccatgaggaaggctgggaattggctcttgaattaatttgttggtatttttaagaatagctattaaagtactgttgttaattttcccaagtctattttattgttagtatttgtcacattttctttgtaaacagtgaattaaaaatattttataggaatattcattcttatctagatttcctacttatataaaaaaacaagtgaatgagattgttacaaagggtaattttgtgtgagtagaataataaaagttgaaattgagaagatgcaatgttttagactgaaactgatggttggtttgttttccccttctttctaacaggccttattccactgctggggattgatgtgtgggagcacgcttactaccttcagtataaaaatgtcaggcctgattatctaaaagctatttggaatgtaatcaactgggagaatgtaactgaaagatacatggcttgcaaaaagtaaaccacgatcgttatgctgagtatgttaagctctttatgactgtttttgtagtggtatagagtactgcagaatacagtaagctgctctattgtagcatttcttgatgttgcttagtcacttatttcataaacaacttaatgttctgaataatttcttactaaacattttgttattgggcaagtgattgaaaatagtaaatgctttgtgtgattgaatctgattggacattttcttcagagagctaaattacaattgtcatttataaaaccatcaaaaatattccatccatatactttggggacttgtagggatgcctttctagtcctattctattgcagttatagaaaatctagtcttttgccccagttacttaaaaataaaatattaacactttcccaagggaaacactcggctttctatagaaaattgcactttttgtcgagtaatcctctgcagtgatacttctggtagatgtcacccagtggtttttgttaggtcaaatgttcctgtatagtttttgcaaatagagctgtatactgtttaaatgtagcaggtgaactgaactggggtttgctcacctgcacagtaaaggcaaacttcaacagcaaaactgcaaaaaggtggtttttgcagtaggagaaaggaggatgtttatttgcagggcgccaagcaaggagaattgggcagctcatgcttgagacccaatctccatgatgacctacaagctagagtatttaaaggcagtggtaaatttcaggaaagcagaagttaaaggcaaaattgtaaatcagtcgagatcgggtgccttcagggtggtatggctgtataccaaaattgtaaatcactacatgaagcttatatattggtttggcctgaaaggtgaagtggggtaggcagggggcgggcttacaggttatggtggattcaaagactccctgatttgtgattggttaaggaagcaaagctttgtctaaaaacttggggtccgcagaaaggaacattaaggtctggccaggcccctcaggaagaaactgagagcaaagaatggaggtcagagtttagtccctggtgttcccccttatctgacgtctgtgtgaatccatttggtgggggtctgggtttctgaaaagtagctcaggggcacgtgttaaggatgtctctaggtgactctaacttccctggctattgtttgaaactgttatgaccttcttgcttatcagcttgctggtttccttctcggggcgagctgggtgcctggagttttcggtgaaggaaactcaagattctcctttatttctgtgcttgtgggaatccccctggcacaccccaaagaggggtccctgctccgtctcacagggatctttttgtatatttggcttagcatcatacatttgccatgttgtttcatcatctgcctaatttactgtttttgaatatttcatttgtttctaattgttactacagataatgctggggtgagcaactctgtgtacataggtttatctcctattggaatattttctttatataggcgttttttttttttctttttttttggagacagagtcttgctctgttgcccaggctggagtgcagtggcgcgaccggagctcactgcaacctccacttcccgggttcaagtgattgtcccacctcagcctcctgaatagctgggattacaggtgcatgctaccatgcctggctactttttgtatttttagcagagacagggtttcaccatgttggccagggtggtctcgaactcctgacctcaagtgatccgtctggctcagcctcccaaagtgctgggattacaggtgtgagccactgcacctggcctatataggcttttttcttaaacctatttagtaatgttttcccaagtttattttttatttttaattttttccccaagtttatttttctatttttttttcatggaaaaatggggtaacttagcagtttcaatattgaagactgaagtttaaaaaaaatttaaattcaaggtacttttaaaattcagttagaaaagtaggctttaaaaattattagagacaagagtaccaaagcggtgtgtgtatgtgtgtgtgtgtatgcatgcttgtggattggaaaaactttggagactgattacttttcattatatatgtgtcacagtgaaacagcttttatgtgtcatgtaagattactgcttgcctctctaaggaaggtcgtgactgtttaaatagacgggcaaggtggaaccttttgaaagatgagcttttgaatataagttgtctgctagatcatggtttgtattgaactaacaaggtttgcagatctgctgacttatataaagctttttgattcctactaagctttaagatttaaaaaatgttcaatgttgaaatttctgtggggctctatttttgctttggctttctggtgagagagtgaggaagcattctttccttcactaagtttgtctttcttgtcttctggatagattgattttaagagactaagggaatttacaaactaaagattttagtcatctggtggaaaaggagactttaagattgtttagggctgggcggggtgactcacatctgtaatcccagcactttgggaggccaaggcaggcagaacacttgaaggagttcaagaccagcgtggccaacgtggtgaaaccctgtctctactaaaaatacaaaaattgtttagctctgtttttcataatagaaatagaaaaggtaaaattgcttttcttctgaaaagaacaagtattgttcatccaagaagggtttttgtgactgaatcagcagtgcctgccctagtcatagctgtgcttcaaaaacctcagcatgattagtgttggagcaaaacaaggaagcaaagcaaatactgtttttgaaattctatctgttgcttgaactattttgtaataattaaactttgatgttgagaaatcacaactttattgtacacttcattgcaacttgaaattcatggtcttaaagtgagatttgaatttctattgagcgcctttaaaaaagtaataccaaaccataaagttaaaatctatgtatattgagtcatatctaaaaccacgtataaacataaattgtatttcctgttttaattccaggggaagtactgtttgggaaagctattattaggtaaatgttttacaaattactgtttctcactttcagtcataccctaatgatcccagcaagataatgtcctgtcttctaagatgtgcatcaagcctggtacatactgaaaaccctataaggtcctggataatttttgtttgattattcattgaagaaacatttattttccaattgtgtgaagtttttgactgttaataaaagaatctgtcaaccatcaaagaggtctgcattatgcttgcatgtcaaaaactttaaaaatcctataatcttctgtcattttcactgagtttccatgggaaaggaatagtaaataatgggtagttgaaatattactcttaagaccaagacctgtatctccagtcatatctgtaataacatcatctgataacctaaaagcatagtattagggatatacgacaaaaccaaagtgtttttgctgttgtcacataccactcaatacttttacaccaggttgtccagtggacaccagctggatgtcctataattcaattctgacactgtctacctggaattggagtcagatcccacaggtggagggctcagcccacaagactgcccccactccagataccaatcgcaagtccctatacttctgactggctataaagtggggttcccgtgaccctttccttggttttgatttatttgctagagcagctcccagaacacagagaaacactctacttatgtttacccatttttaattttattactttattaaaactacatattggttacaatactaatttattgtaaaggatatttcatttatttatttttttatttagagatggagtctcactgtgtcacccaggctggagtgcggtggcacagtctcaactcactgcaacctccacctcctgagttcaagcgattctcatgcctcagcctcccaagtagctgggattacaagtgtgcaccaccatgcccagctaatttttgtatttttagtagagatggggtttcactctgttggccaggctggtctcaaactcctgacctcaagtcatccacccacctcagcctcccaaagtgctgagattacaggtgtgagccattgcctctggcttgtaaaggatatttcaaagaatacagatgaacagccagatggaagagatgcacagggcaaggcatgtgggaaggggtatggagctttcatgctctctccacgtcatcagctacccagaagctcatctggaccccgaccctttggggttttacggaggcttcattatgtcagcattaccattggcaattggcgattaactcaaccttcagcctctctcccctttctggaggttgggggttgaggctgggagtccaaaccctccaatcttgccttggtctttctggtaagcagccccccgtcctgaagctacctagaggctcccagccaccaatcatttcattggcaaaccaaagatacttcaaggggtttaggagccaagagaccaagcaaggattgagacaatatatatatttcttataaataacatgatcacaaatagtattttatatatttctcataatagctggttgtggttactcacacctatcatcccagctactaagaagctaaggcaggaggatcacaggcccaggagtttgcagctgtagtgagctatgattgtgctactgcactccagcctgggtgacagtgtgagaccctgtctcttaaagttcttgtaacatcttagaacattaaccaaccacagattattgccttaactctgaaaaataaagtaatcatacttttacaagatgtattttacataaagttctggtgatattttactctggtcattggaatataggagcttaccacctggtaccactcttcctaaagtggtatactatttggtatagtactggcatactatttggaaagggatgtgaagttggcatgacctgtctagggtgaagtcatgctgtctgctattcattgtgggctttacagtaatgagagtgcttctgttgtcaagatgcttctgggacacgttaaaaaaaatttaagatttctcagtttgtgaaaaggaaggagcacgaatgctttcaagttcctatgacatgctagtcatctttcagtgtgtcccattgttgcacccagtagtctcgatgcccagcgtcacggtgattccaagtttgcctctctgcccactataatttgtgctccatgaagtcccaggacatgaggttcttgttcatttgtgcgtctgggcccatatccaaatattaaacaatgtgacttaatgtatttatcatattgtaaatatgggtatccccaaggctcagaagttaacacagcatatccacagagaggtttgacagcatggctgtggtgactgggaaggccttatgcttgctcctccttctgctgcttgcctttgtgtgggcatggaaagaacattgaattaggtactggaagacctgggtcctggtcttggagattttaccagagcacctgtgggatattggtcaagatgcctggttttagtcctgctcctttgctgtgaaagaggatcttaaggtgccaactctggcattttattttttacttatttatttttaaattatactttaagttctagggtacatgtgtacaacatgcaggtttgttacatgtatacatgtgccatgttggtgtgctgcacctattaactcgtcatttacattaggtatatctcctaatgctatccctcccccttctccccacccctcgacaggccccggtgtgtgatgttccccttcctgtgtccaagtgttctcattgttcaattcccatctatgagtgagaacatgcggtgtttgtttttttgtccttggaatagtttgctgagaaggatggtttccagcttcatccatgtccctataaaggacatgaactcttccttttttatggctgcatagtattccatggtgtatatgtgccacatcttcttaaaccaatctatcattgatggacatttgggttggttccaagtctttgctattgtgaacagtgccacaataaatatacgtgtgcatgtgtctttatagcagcatgatttataatcctttgggtatatacccagtaatgggatggctgggtcaaatggtatttctagttctagatccctgaggaatcgccacactgtcttccacaatggttgaactagtttacagtcccaccaccagtgtaaaagtgttcctatttctccacatcctctccagcacctgttgtttcctgactttttaatgattgacattctaactggtgtgagatggtatctcattgtggttttgatttgcatttctctgatggcccatgatgatgagcatttttttcatgtgtctgttggatgcatggatgtcttcttttgagaagtgtctcttcatatccttcacctactttttgatggggtttgtttttttcttgtaagtttgtttgagttccttgtagattctggatattagccctttgtcagatgagtagattgcaaaaattttctcccattttgtaggttgcctgttcactctgatggtagtttcttttgctgtgcagaagctcttgagtttaatgagatcccatttgtcaattttggcttctgttgccattgcttttggtgttttagacatgaagtccttgcccatgcctgtgtcctgaatggtactgcataggttttcttctagggtttttatggttttaggtctaacatttaagtctttaatccatcttgaattaatttttgtataaggtgtaaggaagggatccagtttcagctttctacatgtggctagccagttttcccagcaccatttattaaatagggaatcctttccccatttcttgtttttgtcaggtttctcaaagatcagatagttgtagatgtgtggtattatttctgagggctctgttctgttccattggtctatatctctgttttggtactagtaccatgctgttttggttactgcagccttgtagtatagtttgaaatcaggtagcgtgatgcctccagctttgttcttttggcttaggatcgttttggcagtgcaggctcttttttggttccacatgaactttaaagtagttttttccaattctatgaagaaagtcatgggtagcttgatggggatggcattgaatctataaattaccttgggcagtatagccattttcacgatattgattcttcctatccatgagcatggaatgttcttccatttgtttgtgtcctcttttatttccttgagcagtggtttgtagttctccttgaagaggtccttcacatcccttgtaagttggattcctaggtattttattctctttgaggcagttgtgaatgggagttcactcatgatttggctctctgtttgtctgttgttggtgtataagaatgcttgtgatttttgcacattgattttgtatcctgagattttgctgaagttgcttatcaaattaaggagattttgggctgagatgatggggttttctaaatataaaatcatgtcatctgcaaacagggacaatttgacttcctcttttccttattgaataccctttatttctttctcctgcctgatggccctggccagaacttccaacactatgttgaataggagtggtgagagagggcatccctgtcttgtgccagttttcaaagggaatgcttccagtttttgcccattcagtctgatattggctgtgggtttgtcatagatagctcttattattttgagatatgtcccatcaatacctaattcattgagagtttttagcatgaagggctgttgaattttgtccaaggccttttctgcatctgttgagataatcatgtggtttttgtctttggttctgtttatatgctggattacttttattgatttgtgtatgttgaaccagccttgcatcccagggatgaagcccacttgatcatggtggataagctttttgatatgctgctggattcagtttgccagtattttattgaggatttttgcattgattttcatcagggatattggtctaaagttctctttttttgttatgtctctgccaggctttggtatcaggatgatgctggcttcataaaatgagttagggaggattccctctttttctattgattggaatagtttcagaaggaatggtaccagctcttccttgtacctctggtagaattcggctgtgaatccatcttgtcctggactttttttggttggtaggctattaattattgcctcaatttcagagcctgttattggtctattcagggattaaacttcttcctggtttagttttgagagggtgtatgtgtccaggaatttatctatttcttctagattttctagtttatttgcatagaggtgtttatagtattctctgtgtactctgtatttctgtgggattggtggtgatatccactttatcattttttattgcatttatttgattcttctctcttttcttgtttattagtcttgctagcggtctatcaattgtgtttatcttttcaaaaaaccagctcctggattcattcattttttgaaggtttttttgtgtctctgtctccttcagttctgctctgatcttagttatttcttgtcttctgctagctgttgaatgtgtttgctcttgcttctctaatatttttaattgtgatgttagagtgtcaattttagatctttcctgctttctcttgtgggcacttagtgctgtaaatttccctctacacactgctttaaatgtgtcccagagattctggtatgttgtgtctttgttctcgttggtttcaaagaacatctttatttctgccttcattttgttatgtacccagtagtcattcaggagcaggttgttcagtttccatgtagctgagtggttttgagtgagtttcttaatcctgagttctagtttgattgcactgtggtctgagacagtatgttataatttctgttcttttacatttgctgaggagtgctttacttccaactatgtggtcaattttggaataggtgcgatgtggtgctgagaagaatgtatattctgttgatttggggtggagagttctgtagatgtctattaggtctgcttggtgcagagctgaattcaattcctggatatccttgttaactttctgtctcgttgatctgtctaatattgacagtggggtgttagagtctcccattgttattgtgtgggagtctaaatctctttgtaggtctctaaggacttggtttatgaatctgggtgctcctgtattgggtgcatatatatttaagatagttagctcttcttgttgaattgatccctttactatcatgtaatggccttctttgtctcttttgatctttgttggtttaaagtctgttttatcagagactaggattgcaaccccggcctttttttttgttttccgtttgcttggtagatcttcctccatccttttattttgagcctatgtgtgtgtgtctctgtacgtgagatgggtttcctgaatacagcaccctgatgggtcttgactctttatccagtgtgccagtctgtgtcttttaattggagcatttagcccatttacatttaaggttaatattgttatgtgtgaatttgatcctgtcactaggatgttcactggttattttgctcgttagttgatgcagtttcttcctagcctcaatggtctttacaatttggcatgtttttgcagtggctgatactggttgttccattccatgtttagtgcttccttcaggagctcttgtaaggcaggcctggtggtgacaaaatctctcagcatttgcttgtttgtaaaggattttatttctccttcacttatgaagcttagtttggctggatatgaaattctgggttgaaaattcttttcttcaagaacgttgaatattgacccccactctcttctggcttgtagagtttctgctgagagatcagctgttagtctgatgggcttccctttgtgggtaacccgacctttctctctggctgcccttaacattttttccttcatttcaactttggtgaatctgacaattatgtgtcttggagttgctcttctcgaggagtatctttgtggcgttctctgtatttcctgaatttgaatgttgtcctcccttgctagattggggaagttctcctggataatatcctgcagagtgttttccagcttggttccattctccccgtcactttcaggtacaccaatcagacgtagatttggtcttttcacatagtcccatatttcttggaagctttgttcgtttctttttactcttttttctcttaacttctcttctcacttcatttcattcatctgatcttcaatcactgataacctttcttccagttgatcgaattggctactgaagcttgtgcattcgtcacgtagttctcatgccatggttttcagctccatcaggtcatttaaggacttctctatgctggttattctagttagccatttgtctaatcttttttcaaggtttttaggttctttgtgatgggttcgaacttcctcttttagcttggagaagtttgatcatctgaagccttcttctctcaactcgtcaaagtcattctccgtccagctttgttctgttgctggcaaggagctatgttcctttggagggggagaggcgctctgatttttagaattttcagcttttctgctctgttttttccccatctttgtggttttatctacctttggtctttggtgatggtgatgtgcagatggggttttggtgtggatgtcctttctgtttgttagttttccttctaacagtcaggaccgccagctgcaggtctgttggagtttgctggacgtccacgccagaccctgtttgcctgggtatcacagtggaggctgtagaacagcgaatattgctgaacagcaaatgttgctgcctgatcattcctctggaagcttcatctcagaggggtacccggccatgtggggtgtcagtctgcccctacttgggggtgcctcccagttaggctactcgggggtcagggactcacttgaggaggcagtctctccgttctcagatctcaaactctgtgctgggagaaccactggtctcttcaaagctgtcagacagggacattgaagtctgcagagatttctgctgccttttgttcggctatgccatgcccccagaggtggagtctacagaggcaggcaggcaggcctccttgagctgcagtgggctccacctagttcgagcttcccggctgctttatttacctactgaagcctcagcaatggtgggctcccctcccctagcctcactgccaccttgcagttcgatctcagactgctgtgctagcaatgagcaaggctccatgggcgtgggaccctccgagctaggcacaggatataatctcctggtgtgccgtttgctaagaccattggaaaaacgcagtattagggtgggagtgacccaattttccaggtgccgtctgtcacagcttcccttggctaggaaagggaattccctgaccccttgccttcccgggtgaggccatgccttgccctgcttcagctcatgctcagtgggctgcacccaccgtcctacacccactgtccaacaagccccagtgagatgaacctggtacctcagttggaagtgcagaaatcacctgtcttctgcgtcgctcacgctgggagctgtagactggagctgttcctattcggccatcttggaacccaacccaagtctggcattttttggttttctctgtgtattgactatgattatagaggataaatggatattgatattattaaatcgtcatttacagaaggcacacaacttatatcctttaaacaaagttctccaaccagtagggtatacttgctggtagtgcttacagctgccaccattcttcactggggctcagagtggatgcctggaggaaaaaaacaaatgaatcttttagctcctagttactgttagcatttttaccagaaaacaatttaaaaaatgacacaagtaagtcttcacctatcaaggctgagtgtggtggcctatacttgtaatctctgtgctttgggaggccaacgcaggaggatctcttgagtccaggagtttgagaccagcctgggcaacaaagcaagaccccatctctacagaaagttaaaatttagctgggcatgctggcacatccctatagtcccagctacttgagaggctgagttgggaggatcccttgaggtcatgagttggagtctacagtgagctgtgattacagtgtgagtctacactgcactccagtctgggtgaaagagatcctgtctctcaaaaaacaagtgattctcctgggaagagatttgtttaaaaagtctgcacctctattgatgataactttgaatgtaaatggattaaattctcccacttaaaagatatagattgactgaatggattaaaaaccaccatcatgactcgactgtatgctgcctacaagaaacctcacctgtaaagacaggccaaaagtgaaggtatggagaaagatattgcatacaaatggaagccaaaaaagagcagaaataactatacttacatgagataaaatagactttaagtcaaaaactgtaaaaagaaaagtcattatgtaatgaaacaaggatcaattcatgcaagatataatcatatttttttattaagaaaatttttttgtagagatggggttatgctatgttgcctggctagtctcaaactctgggtctcaaagcagtcctcctgctttggcctcctaaggtgctgggattataggcatgagccactgtgccaggcctgaggatattatcattataaatatatatgtaccccacactggatgacccagatataaagcaaatattattagatttaaagggagaaatagactctaatacaatagtagttgaggacttcactctactctcagcattggacagattttctagacataaaaccaataaatattggatttaaattgcactttacaccaaatggacctgacatttacagaacattctaataggtgcagaacactctaatagctgcagaacacacgttcttttcatcagcacatggaacattcaccagactagttctggaacccacttcctgccttagtgttctttccaccacagtgcatgataattccgacagaacgccttttatttgtaccttattagttgtagggggaaagctttttcatgtacaaaaatgctgtaattttctgatttaataaagtaattccactgatgtttttatttacttcttgatatacatgttttaaatgtatcctttcatttcctccttagtcccaaagtatatcattgtttacaaaacagttttttaccccctaaaaagcttatttttatttggttaagcttttctgtaagaatgcctgggatgagcccaaagtgaatgtacccctgcaaagagggtagatgaaagacagtgtgtggctttaatttctatttttggggaactcaaccatcaaatggttaaggaataagattccttatgtggttcttgtaaacaaattgagattttggttggggggtgtcaaaagtgacattttcatttttttcagacaaaatgagatatttggggccagattcgggcctttgcatggtgtatactgaatgatcaattttctcactttgagtgtgtcaaaccttctgtctcaagagtcactcctccagggctttcctttttttttttttttttttttttttttgaggtggagttttacttttgttgcctaggctggagtgcaaaggtgcaatcttggcttaccacaacctccgcctctcaggttccagcgattctcctgcctcagcctccggagtagctggg

SEQ ID NO: 82 - DNA, 172434 bp, Homo sapiens
aaaagcggcctctcggctgagggccggggagctagcgctcaagcagagcccagcgcggtgctatcggacagagcctggcgagcgcaagcggcgcggggagccagcggggctgagcgcggccagggtctgaacccagatttcccagactagctaccactccgcttgcccacgccccgggagctcgcggcgcctggcggtcagcgaccagacgtccggggccgctgcgctcctggcccgcgaggcgtgacactgtctcggctacagacccagaggtaagagggcctggctgggggcgtcagggatgagctgacggcccatgccacggaagagaggtaagaagtgggggcccgcgcctccacccggcacagggtaaacgttacccgcctcagtttctgtttgtctgtccaccctgtgctgtgcagtctacctctatctgtctgtttgtccatgcgtctgttgatgggcacacgctcttggcactgtcctctgtgggatttctctgagatcttgtgatgctttacaagctgcaggtgccggggggcgctggagtccccagagggcatccagagggggcagactcctgctttccgtagattttcccccttctgaatggcaccgggggcttgcgcccgggagagtgtctcgccgaggagggagtaccacaagggtcaggtctcggtgtcctgccgactgggagccagctcacgccgagctctagcgggcgtgcgcctagcaacaggtctgcgccctgctgctcctgcctcagcacgctcttcctcccagtttccctcgcctcccagtgcctccgggacagcgctaggcacccagcgacgcgctggcgcggggccgagctgaggcaattgcaatgttagatgaacccggggggctctgctgatgtttagactgagactccaaacgtggcatcgctggaagaaggtctggtggtccctggcaaaggacgtcggctccaagaaaggtcgcgttaggttgtgaggaaaggcagagagtcctggcagaacgctggccaggtctccagctcgccgctctgggaacgaaggccagtgacattctggaatggaccccaagggatgcgtgtgctcatgagagaggagcgctgtgcgccctgggtcctcagccgcagacactctctgcgacagccgctgttccccaagggtcggacgctacggcagtcccaggagttccgccagctgccgggtttgaggtcctgagtccttctccaagcagccaacgctacccacaggtgagagctccctttaaaaactaatcttctgatgtgtgagccagtgcctggctgcagccccataccagggacggtgagccggggagcgcgtctctccatccctgcggtctggaaagtgatccagggcgcgcccgagggcggggagccggcggctctgcgtgcccaggcgcgacgccaccatggacagctcccagccacttcctccactcggggtctgtggccctgggtctccggggaagtcgtgcgctttcttcccagacccaaggcgttggggcgctgggaaagaggaaagggactgagagtccgctggggccctcggtattaccactcaggaggcagcccagccctcaggagtctgtggtttgtgaccaggtcctagctgagccggcagttctgcaggacctcccgggggcactctgtggttctctggcttttctatgacaccacggagacccctcagagctgttaggaaagtatggcccctgagaatccgacccaggcagtgagataatgccagatacaattacgccagacataattagggatccagctcaaactgttttctgtgtagggcacaagttcatgtgttccatcaaattaaattatttatttagtacatatgggattgggaggatatattagttttacgattaatgatagaatggagaagaaatcaaatagagcaaatttatagagaaggcaatcggatgcatttgcaaaagcaactatgcggttttctgatcctaatagttttgttcaaagcccatgactttcttaaagcaatttccaaaggctcctttttagcccagtagatgacttttcaagttggtcacttgaaacagggtggaaaaacctgtagggtttaatctgtgcaccaaattaaagatctcccttctctggtaagaaacgacactggatggggctctttttgtcatttccacccatactgaagtgtgtatcttcctttattttaaaattacaagaaacgcaggtctgctttttttgtgtgtgactgacaaaggccgacggagagtaaaaacaagtaaacacctcttataaaaaaaaattttgagacagcatctgtgactttgggaaagttgctcaaatgttttgtgcctgtttgctgatatgtaaactgggaataacgcaatgccatcttgcagggttgctatgagaattacagtaattggtacaatgtaaagcatttaatccagtgctgagcatagagaaatcgttttaaatggtagcaattacaggtatattttaaagacagttgtgcatttcttttgaattatgttcaccatccctttgccctctctcttaacctagtaactgtttgatagggactccatcttcactttatttttgcatccgagaacttgttgatggaattgatgaaaatgctggagttgatcacaatgaaaaaaaaattcttatttaaagacaaatggaagaacttttatgtgataaaaatcggtcaactgttttcccctacctacactacttggaggaaagataaaagtaagttgttttcaaaatactctcacagccctctggttcagatgatcaatttttcctgattgttctctcacaagaatgcaaggtcttctaagtggctttgttgtctttctgcaagtgaagtactcttgggtattgatggagagtggcctctaaggcctggtttctagatcactccaggatgaagtaggggttagctttatggagtggaactttgcccaggggttcactgagtggtcattgccaagcaggaagcaccttacttcatgcttgagccttgcttaggtgtgagattctgaccaagatacttgctctgcccagagcagtgagcacttatttgatcccagctggactggagggtcccttccagctctgcatttcagggttctgtctggtagacatcactaatacatgacacaccacagaagtttggagaatggaattgtatagtacccagtcttccagttagagttttctccccccacaaaagtgtgtgtgtgtgcgtgcatgtgagtgtttttatccctgtcagttttacattctggtgctcttagatttttattcttctcctccttctgctcttaatagctcagaaggaatcttagcttcttccgtctaaaaggattggagctgaagaatacatgctacagatgctcagaatctttctatgagactgctggtgacatgaacagagcaggaggacatggggccttggatgaccttgaattcctggctgtcttctgtggactcccatgcagattccagtttccagcatacccatggctttctggtaagaaaactattgaactacaggacactcttggagtgaaggccaatgaggggaggaactgtcatgtaaagtggtagaaacgagctcttcatcagtcctgtggcattctgcctattgcaacagtatctgagtcctcaggacagacagagcaaatggcaagagtggcattcagtggggaaggccagcagagtgaaaggggtgaattcaattattctcatcagcctcctttgaagcctgctgcttaagtgacctctttttagtaccttctgtggtatcggcaaagcatcacaatttgatggattaaatgcaatttgcatttgcagttatagctcaaaagagaaatgcaaacatgtaggttgggttcctaaatgggaacaaagttgtatttgtgagttgcatccacaagatagcatatctttgaaaagtctggactacacatctctttctacatgatggcacatacccaggtgtttgatcttatcagggtaaagcatcagctatctctcactgcttgttttttaccattatctggaggcagtttcagtttcctttgaacagtgaataggaaaggatcacattcttactctcttgtatctggttgggttggcaggaggctggaagtggcagtgggtactgggggagacttctcagtgctgggttcctttctactgttttgcaagctattcagctgggcctgaacctcctttccctaaagtctggcatgtagaaactttgctaatttgagtaggatggtgactgtcatggtgacttttattaatatctgcacctctttgctttagctactttcttcaggggccatcttatcctctctggcaggcccctagtccttctttttcttctctgtgccctggcaccaggctttgttcaagcttggttcttcagaacggaggctgcttgcagagaaatgtcatcaaatatacatttgctgtctgcttagttcccttggtgttaggaaacacacatggccacccagagggagaggagctgctactcctctctgcccctgttattttttagggcctgtccctagactcagcttggctccaggaatctgaatccatccttgcctccccacccctgcaggtgagtgagccctggggagcacaagcagtcaggccttccttgcacaggcacctgctcagagcaaggagctggacagcctggctccttgcactgggatatctttgagtcttctggaagggcagtcatatcaggggtttagatgcaacttcagtttaaagtgctttgcccagactttgaaaacctttgaagaccaggtctttgaaagccctgtgaatttctttctctcctgtcagtaggagagctgcaccattagacattttctgttacggagaaagcatatctagatagttgttctggcatggaaggtgtccatgccagattgctgtcttacctgtttttagacatcacacggaggagggagggccacaggcttccccaggagcctgctgcactctttggccctctctgaggtgaggagttcatgctgttctccagagtctttatggctgtaaggtatgcactcagcccttgggacgaggaaagtgcagtggcctggaggacaggcacatttttctgtggctctgccagtcaggaaaggtgggaaccattggagtgttccttggggactgcttgctgcttactgtgactgtactccttgcctggactatcagccaggacctgggcaggttccttgacttctctagtcctttgtttaggggttaggttagaccagtgcttcttagacttaaaatatgccagcaactcacaggggcacgtgttaaagtgagagttctgatttggcagatctgaggtagggcctgagagtccacctttccaacatgctcccaggtgacgctgctggtgcacagagctgccttcaagtcgtgggggcctatgtcattatgacattgatgactttctgtgattctgattccaattcttcttggtgtaatttaagtcagttcccgttgtccgagttgaggaagcccagctggtctgtgccctcctaatgaccttataatgacccttaaaattcttggagataattattgtcgctcctaagccatcttatcagcagactaaatatcttggccccctttaagtttccacttttccctgtcataataaattttccaaagctctctggaccgagctacttttaagcgcaagatcgttgtgcaaatggcaatttatctttgcctggcagaggcatttgaatgtaattttggtggtattaagagatcacttagggaatttcatctaactctggctccagacactgagaatggatgtttacatttaaacaacttttttagactccaaagatcacaatttcttcttttttgaacctgaaaatgaaattaaggcccaattatcttcctcaaccccctccctgtggcactcctgggaggatgaactggtcatcaccagtacattctgggtagcccaagatgctggtgtgcaattgtgttccgtcacccaccgccacaatcggaagcagaaaataagttgagtacaagtttttgatcatcttctatgaggcaggccctgaatgagtcactgagaaggcagttgaatacatggttcctgctctcgaagagctggcagcctggtgagaggacagacatcccagtcagaagctgtcatacagggtgatgggggctaggacagattagtcaagaggagtggagggcgtgagacctgctggagaaatgaagaagaccagtaattcagccagaggagatccaaggaagcttcactgagggcatatgaggagagtcagaagctcagaaaggcctaaaccccttacttcctgcaacctttcagatgcatgaagtttcttacctgcctcagatgcataagctccctcacctgtccaggtccataagctcccttacttgcatcatgtgcataagctcccttacctgcccaggctttgggctacactgggcgcaagagagtgcttctgagcagctgttaggcctctttcctttaggagacctttagtcttctagactagtaatttaaaaattacttgaaccacaaaatgctttttttgcgataaaatcttagtaaatccaatttaaaaactagataagaagtggctgtggttggggatgggagctgatttttgtcttgagttctctcaaaaagttccacagagctctgtgggttccaaggagcacactctgaaaacttcggtcctgggtcatttcgttttgcttttggcagtcatatcaatagtgttagcttagttttattgtggtttgtgttgctatgtctttttgttttgtttttgtgacaaagtctcacttttgtcacccgggctagagagcagtggcatgaacacagttccctgcagccccaacctcctaggctcaggtgatcctcaagccccccaagtagctgggactaattttagctaattttttggactaattttaacatttttgtaaagatgagtttcatcgtgttgctcaggctggtctcaaactcctgagcccaagatatctgcccaccactgcctcccaaagtgctgggattacaggcttgagccattgcacccagcctgctatgtctttaatattctggatgtcttgctgtgtgtgtgtgtgtgtgtgtgtgtgtgtgtgtgtgtgtccatcaacaattttcagtgaaaattgaaaaccagaattaaaattaaaaacggaaatctggaattaccacatgtgtgataatccaacaaagatggggtacatggaggaccagtgagaagggctgtatatgataggtgcaggaaactccaacctgtagctgagcatgggagggacaaacaaagttgtgagctttttgcaaaaatgggcttcttatttacaacctggtctgttaatcttgttaaacctcccaatattttttatataaaacctggtaaggaaaaagaaatcttattttcagggtttaaaatttggcaaggtctatccaggaacttgcatcctttttcattgatgtcaaaaagccaaatttgattgatcgcaagatgttttgaaggtggggcttgaaaagaggaggcaagtcagatagacaggaatggaagagctctgctgcagaggcgcagggttgcgggtggtggctccaatttttagctgtggcttctgtctgcctcctacaaagctctcctcaagggagaaaatgatgccctgaatgggataacacccgaagagaggctgcccctcactgatgagtggtcccagtccttagaaagggaactgaagagccccttctgggcctggagccagctctaaaaacataatcatatgaattattgaagatggtgagagtaaggcttgttcagtctagagagtttagacaataccttcacctctggaagaaccctgctaggtatgtgaggaactctagcagagggaaggggccccctggcagatgggtttccctccaggatgggcatttgcagttgcctggggctccttctactggccataccaaaacacttgccctggacagtgtcaaagaaggctgagtgttggtgggtgatcagcagcatctctttctgggggaatccagccccctgtctggaggcctttgcgtcagcccacatcaccatagcaactggaacatactaaaacaaagactgactcccagaccttgggattcagcctctctctctcctacttcctagatttttcctcaaagctggacttaggttggatccttggttgcgctgatctcttagcactggtagccacagatgccggtttctaaaatcccatggaactgtcttagggggctggccagtggtgaacctgagccatccacttgtacacagtggctgctgcctgggctctcaccatgtgtgggcccttctctccagcttccagaggaggcagtggtatctgcagcgaggagacaaaaacactgatgctcagagttacagagatggtataggctgatgcccttgggtgtctgtctggctcttagtccaaagcattacttgtttgccttctctataggactcttgtcatgccgtgagggacttattcccagcttggtctcctcaagccccctaaaggctcgcctcaggagtcctactgaatcctgggtctccagtgcctcccaggcccctgtcggtgtgcaaagtcatgctccttcttgtaaagaacagtaggaatgagccccaaaaggagtgcatagaggagctagtttgggtgaaccattaaaataaattttttttaaggccgggtgaggtggctcacacctgtaatcccagcactttgagaggctgaggcagccagatcacttgaggtcaggagtttgaaatgagcctggccaacatggtgaaatgctgtctctactaaaaatacaaaaattagccaggcatggtgacacatgcctgtaatcccagctactccggaggctgaggaaggagaattgcttgaacccgagaggtggaagttgcagtgagctgagattgcgccactgcactccagcctgggcagcaagagtgaaactccatctcaaaaaaaaaaaaaaagaaaaaagaaaaaagaaaaagaaaaagaaaaacatttcttttagaagaaaccggtggtttatgacaagcctatttcaaagctgattgtgttacaggcactgagtaattcactctaatgctagttttccaaaggtttgggttcaggaaaacctcaaacatagtggctaagtacttttcctttcctttccttttaaaaccctgtttattttcagaggcgtttaatccatatgttttagatccatttgcatgttactcagcaaaaggttgttttgcactaacgttgctgagccatgagtgagcctgctcatctctcttccgctccaactggtgcttgcagctgagccccatgctcacggccagacgactctaaagctttatattagacacaaggaaacataagcactagaggcaaaaaaaaaaatcaataatattgaccctatctttatttagaattttgatatttcattcatcatgaaatttttggtgctaattttggtttttaaagtgttgcattgcactattctttatattgattattgagttttttggtggcctcttcagttttgcacccaaggcgagtgcctttcttatctcactctcatcctgtccctggtaaacacccacttccagggcccattctgtttggaaggttagcatcccagttggtgtgggttctgctgtggtctcccaggcagagatcagtaccagagacaaggcagacaagccctttggtgatgctaaaggctcctctgagccctgttgatttgaatttggggtgtggggcttccagagaaagtggagaagacaggaacgtgtgtcctcttcagacttgggatctgacgttgctctcttcccttctcccttacttcccttccttttcggagagggcaggaattgtggtgctccgtagtagaatgttttgcaaattctgctgggctgatgtgtcactagtctgtgactgcttaagaagccacagagttcatcagatttctcaattcagttcctggtagtgagagagaaagcagttggaggattttggctttgggacttccatatgcagagatttcttcttgcttaaatgattttttttttaaataaaaaggcgtggtcatctcagtggtgtctgtttagttggtagctttgaagaggcttggagattcctctgaccacataattgtgggttatgtgtatgcctgaactttccaggtgactgagaaacagctgaaatctgttctacattttaaaatcacagtgtaatgttacaaatggtgacacattaacatatcctggagttttctgagaatgaccatgtagtgaagttcatttttactttaaacatctccatataaaatttatttaaataaaaagctatttttgacatacaaaaagatgatacttccgttgaatcttgtgtaataagcatgaacttgagcttctgctctgttgaggttgtttgaggacatcacccctctgagctcagggggaacgaggggcagagaggcagagtcactatttgaatagagccctgctcatgaagggcccttagtggccattgtgggatacgtggtgcagaagtctgtggtttccctcagtggagatggcttctcatctcagccacgtcccaatacaataaagagtcctttcttcattcagagacaggacccctacttggctcaaaggcagagacttttcatgttctgttttactcccaagggctagcacatagtaggtgctcaaatattttttaaatattcaaatgaatgagtcctgcgtctgaacaccagccccccaagcatgtacatttctcactacatttgatgttcactcttgtgtattctgctctggtatttgaatgagactaaagcctgactaaagtcaatttctcagaggtctgtactcctgtggctttatggttatttccatcagcatcattaatattcagtgcttattgggcaactaaaacattcagactcacgcagacagcattgcatgcatcatcttatttaaacttcctgacaactgtgaacaagacattgtcctgttttgcagatggagaaggtcagtgaagccgcatcacttatgcagctccaggtgggggtcactcggctcaaggtggtggagttggaactcagacctatgtcaccgtgagtccaaaagctcttcataataactaatgttgctcaaatcttgacttttgaaaaaacatgttgaggggaatattagaattcacagtagatcagactcatagaacagtattcatagagttgaattcgttgagagtaattgtaacccgaatgcactcatcattgacccgcccattctttctagatacttgggtttcagagatgactccgttgcatttccctgcaatggaaaagctcacagtttagttgaggagacagacatacattcaactacctacaatccatgctgtaacagaggcataaacaaagcaatatggaagcactacaaagtgatggtaaactactttgctggggaaagagacaaggtaacatggaggaagtgatatttgattgggccttaaagaaaagtacaatttctcccaggccagagaatggagggttaagaaggaaggaatatcttgaactgaatgcagaggattaaaaaaaaaaaaagatatttagagaagaactagaagtttcctgtggctggaaatgagatcataaaggtggggcagggctgtagatccttaaaagctgagtcagggagttcagcttttcacctgagtgaagtgtgtgatcaattggtgggtgttaggtccttgtacctggtggcaggtatctaaggttgggcttgtcttcctccctcccaagggtggtgttcttggtaagaaatgcattccagaatcccacttctcactctagattatcggataatgtcactgctagggctcagtaaatacccttcagcaagaaggataactgcgctgtccgaagtgaattgttggtaccagggtaatagggcccagaaggtgatagagagaagattaaatcagggacatttcaggggtcttgtggttcgagtcgctgccaacatgaggtttcttcccgctgcaagtagaggctccaagcccttgaggaaaattttccgaggctcctaatcccaggcccttgtctcacaatatccctttggaccgatgcatccctgtttgctgtatgcagtctcagggctggggtgaggagggtttatcctgtggcctctgtgctggctttttgtgagctgtgcagatattatgattttttcataattcttcatgaattcttggacacatttctaactgccttgttgactgacctgcagcagaggcggcagagggaaagtgggataaagggacagcatttcaagtgagactcccctttggggaggagggagtagtcaccacgaaggatgcagattcagctcaaatttcctcaaagcttaactggatgagatggatactctgaatgcggtctggtctgccgatgccccctgggtgaccttccgtagtcctcatctcttctctgcactgtagttgtcatcagacatttgggtgattttagcaaaataaacccacccacaaatattcttttagtgccatccctgtatgtggtcttaaagcaaatctgagtatgcccaccaagtagccagaggagagaaagtcacaaaggctgggttcttccattcaacagaaacacattaaattcagatcaccaatatctccaagatggttctaatcagacaaaaagagagaaataatgaagtattccaggaagggcccagttaggttttgttgactgcaaaataaactgttctccatattctttctccaccagtttgcatgctgtctactttatatcttccttgggttgtagaatattagagctggtgtaataaactgggaaagggcataagctttggagcccagcagtcccagttataaatctacctcctgcactggttagctgcttgactttggacaggttacttcacctttctgtgcctcagttgcttatccatcccctaaaataggatgattatatattattctgtgtactatgtgaactaatacacggcaacttcttagagttatgatcttgtacatactaggtatacaaaatagcatgtctcttccaattgtcaatgtagctgattgaattagcagacactgtatgtagagatggccatgctgtgactttgggggaatttacaaactttaaacctttggcaagctatgggcagtagctggtcctagaacaagaatctgaatggccaaggcatgtgctctagtgttcccttgcagagatagagattgtgtctcctcggtgtggtgtctgtcaagctcaacactccatgagatcaggaactagtccatctcagtcaccattgtatctccagaactgagacattcaggcatgaatgttgtcctgagaggagagctacttactagcatttcctgagacctactacttacagtcactttataagtgctttacatatattggtaggacacagaatagagaaaggtagtccaggtcttctgacttctgatgaaaatacagtttaagaagtgtaaaaagcagacttgctagtatctctgtgccctggctcagaatatcacattaagagggtaagcgttggagctgcaggttttgagattgacatgggtggcagcaggttggtgcaatagtgaaatttgaagggcacaaactccttgcctagcttggctgtgtaacctgtccaattatttgctttcattcaggacgtctttcccccttctgctctctgaaactggaagatgttgagaggcacataattaatttgggtgtgttagaccaacgccctcaaagttccttatttacttgtcattatgcataactacacacattatcaacacgaggttaagtcttctgtggtgggtgtttttctcttacccaaagtgaaggggagtggttaccattgaatggtggaactctggttatcacagctgggtttcccacaggtagggttacccacaagatcagaataatttatcactaattacggttttggaaatgaagcttagatgagcccttcctaaagtgcatttcttgggagcatcgcttccttgagctgttactagatattctgaggtcaaacaagtttgagacaaactgggataaacaaagttgacctgttttcattttccaagatcttctcaatggctttgtaaaccagcatgcaccatgtctctcagggagaggtgcatagtgtatagtatctcccagacgtgttggtctagggaattccctttctattttcacagaggactttctgagacttgggtgctgtgggacctatgttggggaaacactgagctaaatattcattagtgggataggatgaaaaacaaacaccacatgaaactgggcatccccgccagaaattcttaataggtgctcattacagttttattaacactagggtcatctttgaacttaagtagaatgcttttgtcaagttgtttttgttatttatgattttatttttaggtcaaagtgttgccaagtgggttcctggttttggggatttgaaaagtgggacaacttgaggtcaaagaccctccagcagtttatctttgcctttctgttgtctgtgatttttatctggtttaaccacaggtgacctagtagtcccatctggcccctagagagggttgtagcttgttccaaatggtcccaaatcagaaatttctccctcacacaaaataacagtgagcttacaaacttgtagtatccatattcatatgactatttttttaaccagaagtttttcctttgcttgtctgactcattcactcatttattccctcatttagcagtttactgaagtcagcttataatattgcagaggctgctaggctctggggatgcagcagtgaccaaaatgagctgagacctgcctgcatggagattacagtctagagcagtgctgtccaggagacatacaatgggtgccacatttggaattctgagttttctagtagccccactaagacaaagtttaaaaagaaacaggtaaaattaattttaataatatactttattttcacctcatacatccaaactattgtcacttcaacaggtagtcactataaaaagtaatgagattgtttacatttttttatactaaatcttcaaaattggtatgtattttctgcttacagcatatctcaattcggacctgccatgtttcccgtgcttaatagccacaggcggctagtggaacagtgtaggtctagggagagagacaaatataaaaaaatagatatgaaaaaatcacgggcgtatgtgattccaaactgtggccagtgatatgaagaaaagttgaaaggtttgaggagaaaaaataggggatctgctacaagtggctggtggaagtagaagtgggagcagggagagaaagcctcttttgggaagcaacataggcagagcctaggaggatagtgagtagaagctagaaagaccaagagtgggggcaaggatgtcctaggtaatgaggatgcaaagaggcctcaagacagagagtgagagaagcccagattggctggggcagggaaagtgaggtgaggagcaaggcaggactgaaggggaggcaggggtgagggggcaggaaggggatcatgcagcatcttttaaaccatgctcaggactgtgaacatcatcctgaaagcaatgggaagacatgaaatttcaagcaggggagttacattgtctgatttttctgttttttttaaagggatccctctggctgctctctgtctgggtaggtgggggtgataggcaatagttagcaaaaataaatgcaggaagatggcaggggatgctatggtgctgggctagggacctggtgatggtgggttggagtggaggcagtggggaaggagaagtgtgggtggatccagctggtgtttaggagatgcaatggacagacaggatggtggattggacatagggtaagggagagggaggtgtccaggagaactcccaggtggtgggatgagcatctaggtggatgttaggaagactagagtgggtttgggctggagattatactccaggacacactgggcacggccaagcaagaaaccttgcatcttttcaacaggagttattcattgctcttgaaaagccaggtgcagtggctcagacctataatcccagtgctttgggaggccaaggtgggaggatttcttgagcccaggagttcaaggccagcctgggcaacacagcaagacccccatctataagaaaaaggaattgccaggtgctgtggctcacatgtatagtcctggctacttgggaggctaaggcaggaggatcatttgagcccaggagtttgaggctgcatggagccatgattgtaccactacactccagcctgggtgacagaggataagagaattttaaatgatatggagttttttgttattatctctgaggaaatgatacaaaattacctctgattcatgttgcaatttattattgcagtaacacacagcttgtaccagaaaatattttcataaagaggtggcttttcccataactttaaactttaaaaatagcatttaataagagcttaccaggattttattttgatttcttttttgtttatttatttagctgtttttgagatgcgggggcgtctcactacgttgcctaggctggtttcaaattcctgggcccaagcgatcctcctgtgtcggcctcccgagcagttgggactacatgtacatgccaccgtgcccagccttagcaagtattttaaagagggctttgaagtagcttctctttgtggattacactcagaactatagagtgcttagcaaatggatggggctgcagtgaaatccactgtcactaatgtgtgctctcagtgggtccatttttcatcctggagagctctgatggagaacttgaaacccaagatgtattcgaaaggagactgccaggaaatgaatgagcagactcagggtattctggatgaaatgctcttattacaagactgttggtgcatgttccatgtcccacttatgtgtgtgataagccaccaatacatttatcagtctgacctgtttaccgaaaaagatatcaaggcttgagagctctgagtcactgccaggtagatcaataaaaccatgagatattgcagttgcttagaccatttattcagcaaacgtttattaatcaaccactctacaccagacatggagaatgcaaaacccagtaacttacgctcctacctttcaatctgggagcgtggggtgggtgactggggtcaggagaacacatgagattaatgcattttatgtccatataaggcaaagagtgggcagaaaagtgggacctcattattcttgggggaattaatctttgacttgaaccttacaaagtatagtaagaatttgtctgttgattagagagggcattttaggcaaagggcaatcagataacctggtacattaaaggagctatgagtggctcagggtggctggggtgtaaggatgaagctggatgtggagagagatgaggctctggcatgaaagatgtccagagaagtcttattaggtaaggttggaaaggttcgtgtgacacttcatggcaccagtttgacgaacctggccagaactgcctacgggaattgtgcacagcaacctgtgattgtcagaaattgagaagtggaggtgattgcagatcattatagatgattataaatagagtacaatgtgtatttgaatataatctgggatcatgatatctttggtgtagacacaacctccatcgctattcgatgccacagggagcacctacagtgtcccggtgctttgccaggcatgagcagtgctggcgtgtggagggtagggagagtgcagggaggacagaggcgtgcagggtccagctgctcctggggtgctcatggtctaaggggatagagagatgtgtacacaagaaaagcagcagtcacactgttcaccaacatccagtccctctttttttctgggcacaagggaggctaatgcattccacactttcgatgttagttgtggtcaagtgtcttgtcttagtcaatgaaatatgaacaaaagttgtgtgtgtcatttctagaagaaacgtacaaaaactaacacacggttctttagctcctctcctctgctgcagtgactggcaatggcctggatggaggggccagcttgggtacttaggtgcccataacagcccagggtcctccacacacccacggtggacctgggaactagatgagaaagaagtcctgcagcttcgggttctttattaccacagcagagtataacccatcctcactaggaagcaatgccaggccgcctccactgtgttttaggccactgtgtagaaaggaaatgctccttcattaattaattcattacacaaacatttgggtctgtgctctaagcactgtgtgaaaccagcctggttctaagacttttggaggaatgagcaataactaggagttggagtggtcaagggaggtattttattactttttaaaaaagaatgtacatggtgcatgtgtatatacatattacacatttttccattatataagccatataaccgtgtatttccttatcacttggaaagtacagaaatgaaaaagaaaaacccataatcctactactgaagatagacactataggaattttgatgaatatttttctagtgttattactgtatattttttacataacgttgatagaattttaccttatacgtaacacatcttaaagtttattcataagcattttcagttttcaaagtcgtctttttaattgctataaaataacatcaaatttttctaaatttttactattaacatttaaaatgaccgttttatatgttttttcccaagttttgctgatttccatagaatgatttctagaagtataagtaaacaagaaaatggcctccaaagatttattcaaattaacagtctcactaattgtgtacaacagtgttatttacactgatatttgatattactataacttaaaaaatcattttaacaggtgaaaattcatagctaataggtttgtatttctttgataactggagaggttgaaagccatcctatgtatttgtttactagttatttttagtttttggaattatgtattcatatcatatacctattgatggggtattcatatttttcttatcagtaggtctgatctcattacatatttgaagttttctctcccattcttccctttcagttattttgaaaaatatgtaaaatattttcatgcagttcaatgtgttgatcatttacatattgatttattttttaatgtacaattctagagtcttctagaggttccgtggattgatttttaagttctttgacctgtctcaaatttacttcagttcatagtgcaagaagaaactctaacacacttttcccttcaatttactaacttgctatcccaggacagcttcatggaacagtctttcctttatccgttgatttgtcctgccagtaaaagcttatttgatccagttaccagtgtggaagatgacaggaatgagataaagctagcacagtgggaattcagccagacatttgatctgaccatctgggcaaacttcacagattccatcttagcagaccaggcctgggtatgtctcaggttttgcagagatgtggtcagcttagggatgttctgcactaaggatttagccaagtgaggattagcccagagtggcacaatgggctgccagccgccttgtgagcacgagatctaggcagtccctgcgcagcactggttaggagaggaaatagatggctcttccctagggcctcgtctgtgtttctctcaatgagttgaggcctgaaagaggccacactgggactcccacttgtggcccaggctagggaaggcctggtctggagagaagtcacaattttgagagtcatatatagtttcttctgcaaaatgagagcttatgaaaggtttattcacaaatagtgtatggaatagaactaccctgcacaatcctgttactgagcatctgcccaaaggaaaagaaatcaatatattagtatcaaagacatacttgcacttatatttttattacagtattattgacaatagcaaagatatggaatcaatctaagtgtccatcaatggatgaatggataaagaaaatgtatatatatgcaatggaatattattcagccacaaaaaataatgaaatcctgtcttttgcagcaacatggtagtataaccagaggtcttcatcttaagtgaaataagccctgacttgatcacaaattttgtaaagaaatttattattttttattttttagagagacaaggtctctctctgccacccaggctggagtgcagtagcatgatcatagctcactgtagcctcgaactcctgggctcaagcaatccttctgcctctcagcctcctgagtagctgggactacaggcacataacaccatgccagctaattttatgtgtgtgtgtgtgtgtgtgtgtgtgtgtgtgtgtgtgtgtagacgggatctcatcatcttgcccaggttagtcttgaactcctggactcaagtgatcctcccatctcaacctccaaaagtgctgggttacaggcatgagtcactgcacctggctggaaatttgttaatagcctatgttgaaggggtagctgaaatcacctcaccatcctctgggtttccagagcacctccattcttatagcccatgtgagtcgtatggtggggtgtggttctatgtcctttctcgccctctgtctgggactgccgagagagcaggtctcatgtcatttatttgtagagtctcagggcctattgcaggatctgacagagtcaatgactgctacctttgcggaatgaatgaataaaatcattaatggctgaatgtggctggcttttccacgtcttcccacagctggggtacttaatattggctgaggcaactacttttaaactgttggtatttctctttaataaaatcttgggaaaaccttgattttcatgtcattttactttgggactttttccaaaatccaggctttatttttcatcaaacacatgtcatgatcatgctcttagggagtctttacaaaccatcatcatgctcttgagggaatcttttgaaaaccttactttagatcagagttagagaagaaattcacattctaatagatttgcagggtaattgatattctcgccatctctgttcatatttgaaatatttcagtactcgatgtaggggcaaaaacattgagtttacaccttctaataactttccaaaaacctgttataaagtaaaactgttgattcagaggtttggggatctctggggatacagctcagccttggggcccagggcctaccgtagctgggctacaccttcctctccagcttcttgtccagctgcttctcccttctgttttagactctagcaacatcctaggattgttatggtcctgttgatgcaatgctgcttcttgccatcttgctgctgtaaatgctgctttctctgctcaatcatctagcaaactaccattcattcttcctgaccctgctgaggcatccccttctctgtgaagagttccctctctccttctccaatgtatcagtaagctattgctgtgtaataaaccacccccaaggcagtggcttgaaacaactgtgtattattgtcctgtgggtcaaccagctggttctgctgatccggacaggcttggctaatctcaactctgttttgtatctatcggcagaacaactggaggctggctggtctaggatggcctcatttatgtgtttggcattggctagctctcaattcagtggatgagggtgactggaccatgcgtctctcatcacccagtagactagcctgggtttgttctcgaggtgactgatgctgttctgtgagagagaaggaaagcatgcatggcctctggaggcctggatctcaaaacccaatggcacaccagcacttctgctgctttcttttggctgaagccaggtcagttcatgttcaaggggaggagatttagactctaccttttaatgggagaagctgcatagttacattgcaaaagacaaggatctgaggggaggagagaaggatgagtggaatggttgattgatttttgtgatcaatccaccacacccacctttgatagaggtacttactctgtagtacaattggccttccatactgtgggttccatacctatagattcaaccaattgcaaactgaaaatatttgaaatatgtttgcatctgcactgaacatgtacagactatttttcttgtccttacaggataataatacgggataacaactattgacaaagcatttacattgtattaggtattataagtaatctagagatgatttaaagtatacaggaggatgtatgtatgttatatgcaaatactacactcttttatattagggacttgagcatctggagagtgtggtatctgagggagttcctggaactaatgtgcagatgccaagggacaactgtactattgtacttggaagtactcatggggtcatattgcattgtttctttgagtcctaattctgccaacatggcctggtgcttgcattaatcagctttctaatctctgagtaacaaggcacagtaacaaggagcagtaacaaggcacagggctggcacctgagagtggaggtacccaggaggcagacaccataaggcgggaaagggacatatgtacagaatcatggctgcatgtcctgaagcctggcttaagccatcaacggctgctgggcaggggccaaagccctgttatccctttcgcccttcctgatggctctgcctctgccttcagctgggcgtgggcaggccccacccaccgaggctccagcccttacccacagtgtcagcaatgcagcctccagaggatgtgctcaggccctgcccacacacccggatgttgacaggggcatgactccagcgccagctctaatggatggtctcatcgcttttaaaataatgaccatggggcgtgggctggcgagagcagtgacatcactttcctgcaattctgggtcagttcctgctgcttttctctgtatgtttgaatgactgaaataaatctattggttggatatatttcctggaagacttctgacatgttcacatgcctatcttggaatgtggtcaggagagcaatggctttggacttagaggtcctgggttcaagattctgctactagcttgctgtatgaacttggactagcaacttaacttctccaggcctgtgttttctcatttgtacaatgatgggaggaatacccttggttttgtaaaggaatggtgaggacgaactgggatctcttgtcagagacactgtcttagtcagtttgggctgctataacaaagttccacagattaggtggcttgttaacagcagaaatatatttctcacagttctggaggctagaagtccaagctcaggatgccagcatggttgggctctggagggctcctaaacaccattattcttcattcacgcttctcagagccctaaggaagagagtgattcctcagctcaattgtgaactgctcctgccactctgtacttcctcgtgtaaagaaaccagactttacatcatgggtgaccactcccgcagagttgtacagaacctcccttggggccacaggatggctggattctgtcccctcatatacaaggaggttattgggacagcatttctccctagaacaagagtgtatatttcagaaagctatggatgacttcccatggtcatcagatcactaggcaggaatgctattctcctgatagatgtgtggaaagtattcaattcaattttgacccaaagttctaggcactggattaagaaatgccaaacccaaaacgtttaactttagaattaaaaaaaaaatgaaaaagaatcttagaagcagcaaaatattataatggaaagttccctggacgggaagacaaggtggtgaagatgacaatgatgatgctgatggccagacaccgtgatgagtatttgcattcattatctcctttagacttcccaacagctccatgcagttggttctagaccatccagattatctagctgagaaaaaaagggtctgagagaggttaagcaacggttctacagacacatagctaatctgtggcgtggaagagatctgctgtctgagctcaagtctgtcttgggctccagacccacaggtctctactttgcctctgactcattttctgttgtgggtaaatggctgtctttggactgcaatgatcccatctggaatataaatcagatggaccctgtattattctgttctcatgctgctaataaagacaaactcgagactggataatttctaaagaaaagagatttaatggactcacagttccacagctggggaggcctcacaatgatggtgaaaggcaaaggagaagcaaaggcacatgttgcatgccagcaggcaagagagcttgtgcaggggaactcccctttataaaaccatcagatcttgcgatacttattcactttcaagagaacagcaccggaaagacctgcccccatgattcagttacctcccaccaggtccctttcacaatgcatcggaattatgagagctacaattgaagatgagatttgggtggggacacaggcaaaccatatcagaccccaagatctcttttcagctctataggctgatccctgtgacttgcatcttgcagaagaaaacaatggcttttcagtgccttttttgtaaataatatggctgcatagtcagagaatatgggagacagtgtctcctttattttgaagacataattgtggtttggtggaaagagctctggactaagagacagaaggcctaggttttacttttagcttcaataccatgtggccatgtgaccggaggaaggttgactcttctgaacttcagttcctctacctgagaaacaagaagcttggactggactggctctaggctcttgtcagctctgacatctgggcaaggatgccaggtgcctcacctactgctccagatgtcccaggagaggtttccatgcaggatttcaacttgctgaaagcacgtgcgtctttcctaatgaatgactgggattccttcacaggtgaaaatctctaaacctctgggaaagtctgtaatgtcacagcaaactcatcttctttgtatgataaaaccgaggtctttcctctggttgatgataaggggagacagagttcttgtcatagtacttgaactaggggacaagcaaaagggccacataggaaaggcttttggttgttgcttaataaaagcaacaataaggttttggaaaggctttaattcatcgctcatgtagaaggtagccgggcctgaatttctagaagatccaaagctgggagcaagtcacatggctgcacggagaactaccatggccaccctggaactgcacgttttcccctttgtgcatttagctagcacgagagggccccaattcctgtatcaacacctatcctcccaccaggtctcacaaccacatgaaagcaggagaggcggatttatgccttaacagcccccaaaacaagctttgtgcactgataaaatcagtggctggcttagagatcacatcagccctggagaaactgcttcatgatttgacaaggctgctaaaggctgtttgcattctgtgagtcaggtccgaagcaaaaggaatacacagaagaagatgattatgagtgttttgaaaacctgccccttcctgcccgcccgggacaatatttacaaagcagacatgcaaacaagcagaccttcttttcaggtttaaattgcctactgagccaggcggttcccgtgctggggtgcttgcccagcactaagttaggtgtttaaaaaacgcatttgccagccagctgcctgccttccctttggtggttaccgtgtggttaggaagctcaggagtagtgttgttcttacctgagtaagatacagactctttttaagggaaaacattcccaaggatgtctactgttgaattaattaactttattattatgttatttaaatatatacaaacataaaactaggtataaattcctcagcttatagttcttacacatctataaatctaaaacaaatttacaaatgatatgcaaacaaaactctaacatgaatcaaatttaaattgcttacataaacttgatatgccaaatctaccaatgttgggcttcacaggaaaaagttttatctctccattttgcatttcacttgttttggtctcagcttatttaattttgtgtataaaggaccattgtttgagtcatcctgtgtcactttttcccactttttaacactgaactcattgggacatgaatttattattttattaagctggttgctttaaaaggaaatctcccaataccttacactaaaagaaatttcaattgctggttaatggaatattctacactctgtatttatgtactggtaatgaataactgaaagctggtgagggcaaagacaaggtatgtaaaatgcgtttgtgagcaaccagaatatcttataacacattttattggggaggctggcatgcccataccaacgtatgtcatgtgatgactcagttcttctaccacttaattctaattactgtgaaaactttcgaggtgcctaggtattgtttgaccttgacttggtccaaggtattcactaatgcagatggcgttgaaattgtgtgcagcacttcattacaagggcttatccagttgatctagaagaaaggcttgtatgacagagcccttgagactatgtccataggagtctttggaccccagttctgaaaaatattctggagagaagctcatggtgagcgctcatagaagaaaaaggtctccttgcaatatgggatgacccaagagaataattttcttccaggaaccaggaaagaggaaatggggatgaatttgtccatttgatcatttattcactaaatatgtgtgaaatcccacctgttttacatacctagcagaggggatggggaaagggtcatggtaaaattaagtataattgctcccctggacagctgattgagagagtttgaaaagctctttgaaattgctttctgaactagattataagctccagaagaaaaataatctctaacctttggagttatgccacactttatgcatagcgttatcctgtttgatcatctgctcactttccagttttcttttcaaatgacctccgtctatttctgggaattaaatcctaagacggataaaaatttgccacttttaagcacagtcttgaggatgtgctgaaggctttaaggtccctagctcctccagagggtgtgttagatgagataatcatctgcatgtctaagttctgctgcgtttaagatagaagagcctcagcttacaacacaaagcaacacaagaaatagtgcatggaagtcaatcggtgatcaatgtcaaatcagtgtcagaaacaaaaagtattatgagtttgggtgagagactaaaattgtgggctgggctttcttaaaacaggtttaaagaaaaggtgggactagacgtaggataggtgagaaataaattgtagacagtagggaaaggggcatttgaggttaaaggaagagtagagacaaagtatctagagaggattttttttttttttttttgagacagggtctcgttctgtcaccaaggctagagtgcagtggcacaatcatagctcactgcagcctcaaattcctgggctcaagtgatcctcctacttcagcctcctaagtagctgggactacaggtgcatgccactatgcctgctaattaatttgtatagaaacagagtttcactatgctgtccaggctggtctcaaaccactggcctcaaatgatcctcctgccttggcctcccaaagtgttgggattacagacatgagccaccacacctggcctgaggagaggatatttgtaagaattagagggaggataagtctggaaagacagattggatccaaattttggaggccttggaggccagaacaagagtgtgcatggtactgtagtcagtgggagccactggatcaactgttgagggacagtaagacatcatagctaaaggctgtcttaaaaacattgagtcatcaaaaggttagcagccagcacagtggccttcatttaaaaccttttctttccatttcaatatttctgtcagtgctctgccattgcattgacatttacaaagatctgtttgtagtaggggtagtttataggttgctgagattgtgtcctggtgttcgtaggcacctgtgtgctctgtagagagcatgtgtcagggagcacctgtgtgctcctggacagggagcacttgtccgcaggctcctgctgacagcgtccacttgatcttccctctctgtgtctcctctctctacccattgcagccccttgccaagcttcattctgaatataatacttaacccaggatttgtgggcagtttataaaactctttgacacttgtgtcactcttagtaaccctttgaagtcaggagactaggctaggtatttttctctttatagatgaagctaaggctcaatagggagaactaagtcatccaagatcaccatggcctgttcagtatccggcatgttaggaatggtgagtggtgcatagacgctgactgacaaggaggcagacctgatgctggggatggcccacctgcagccttccactgctgagaccctcacagctgtaaatggaaggtattacatacagcgcatctgccccccactgcccccacttaggcagctgcattcttgagctgggaatataaactggcatcaaccaccctccatcctaacttcaggtgggcaggcagggttctagcagcacccatagagctgacctatgagattcagagcatctacctgtaccacacctgtgaaaaataacaagccaggatacagtggcatcatcacagatgaataaattatatgaaaaacaacaaacaaaacttaggcccatgaaaatgttatggaacagaaaagaaggaaataactatagcatggaaaggtagagaaaaaaacaacagaaaaaattgctataggaaatagaagtagtttgggtagcatctgctttgaacactccacaataaaaaaaaaatcaattctatgaaataagagataacaggttcaagcgaaataacatatggggaagccaaaaaaaaaaaaatacctgtaaagaagccaacaatgggctaggatggtttaaagcagaaacagaaaaaattagaaagtagaactgactttgctaaaaattgtcagtgatttaattgatcaacaccatatgctgtcccagaattgcagagaaatagaaagaaatgccagtgattggggacaagatgataaatatgaatgctcgaggatgaagaaacaagagtaagttattgatttttcttacattacctacttgtggtcagatgtggggatttgcacagtttcatataatgtccgtgaaaatatcaattatattgaaagatttaaaaatgggtactatattaaagccagcaatttcacttctgacacctgatgttaaagactttatcagggaagagcacaggaatgcctctacaataatttttattatagtgatgtttataatagtgaataattggaaacctcccaaatgcccagctgtaggggaaaggttgagtcaattattgtgtctccatataatgtaatcatacgtagctatttaaaatcttgcaaaagaatgtttatttatatgggaaaatgttcatattgtgaagtcagcatttgaatctatctgagacggagtgctgctattaaatatttcttcaatcaactagaagaaaatataacaattcagtttctataaagtgtgaatttccttttatggaattgttctggatgaaactgataggttaatttcatggtactacataacaaattgccatacttaaaacaacaccaagttgttagttcacagtcctgtggataggaagcatggtgcagagtgacagggttctctacccatggtgtcaccaggctgaaatcaaggtgttggccaggcttaggtcttgtctagaggctatgggggaaaatccgcttctgggccctttcttgtagtttgctgaattcatttccttaagctggtaggactgaagtccatttccatgtttgttgttagctgggggctgctgtaagcacactgaggccagctgtacttcttgccatgtgttcccctctgtcttcaagccaacaattgtgcagcaaatattgtttgtgctttgagtatctaggttctctttctgcaaccagccagagactactttcttcttttaaagggcccatgtgattaaatcagactcacctgaataatatccgtatcttaaagtcaactgatttgggactttaattacatcttcaaaatctctgtactgcagtacctacattagtgtttgattgggtaactgtgagcaaggtatgtgtgtataccaggttctgggaatcttggtggggggatcttaaaattctgcctgccacacaattgatacattgatttttttcttaactaataatatggatgtgcaatatcgtgacattattgagaccaggcttcataagatttcataaagtcttatgaagcagaaaaagtcttacaaatatagcctacaactatgtttcccttttgatttgagtaagatttgattgagtaagatttagactctcctgaaggacaactttccattttcttttttgagtcacctgtgtttttttgtttgtttgtttgtttttgagacggagtctcactctgtcacccaggctggagtgcagtggcgcaatctcagctcactgcaagctccgccttccggattcatgccattctcttgccttagcctcccgagtagctgggactacaggcgccctccactgcggccagctaattttttgtatttttagtagagatgggctttcaccgtggtcttgatctcctgaccttgtgatccgccctcctcggcctcccaaagtgctgggattacaggcgtgagccaccatgcccggcctacctgtgttctttaaacttgtacttaaaatggctcactgacttggctccttgagaacttgtctgctccttgtctattcacctatccacccactagtctctccatctaccaaatcacccacagtatatctatccatgttatccattcaaccatccatccatccatccatccatccatccatccatccatccaaccagccactctcacattcagccatccatgtcctcttccaaccatctggctgtccatccagcaataaaattaccatttccccatccattcgcctactcaaccttctgtccattcatttgcctgtctatttaccaacctacccatcacgcagacatcatgcttctcattgatttaataaactactttgaactctaactacatgctgggccttgtagtagacaccaggatactaggataaagcctcttcccccaacctacttacagtctagtggagaaatgagacaaaaaactaaatagaattcaacatgaaaattcctataatagaagaatgtcaggtggtttaggagcccaaagtcgggtaggaaatctggaaatggtgaaaaaaggtatataaactggcccttggaggatgacagttgtccattgctgaatgaaatcctgcaagtttttactgcatccatcatggagcctggagattgcaagtgttctcaatctctatgagggtgacatttttccagtgtgactgatgtactgtagaaattacagagcacagtcctggagggctggatcaatggcattgattttgctctcttctggacatggtcaagtgataatgacagggaagattgagacatgccagaggcaaccttcccaaactgacagtgatgaatgtcccattttaaaccacagttcctgtgagcctgatttattttatttatttattttgagacagagtctcactctcttacccaggctgaagtgcagtggcatgatctcagctcattgcaacttctgcctcccggagtcaaacgatcctcctgtctcagcctcctgagtagctgaggccacaggtgcttgccactaggcccgcctaatgttttctatgtcttcgtagagatggggtttcaccatgttgcccaggctggtcttgaactcgtgagctcaagaaatctgcctgcctcagcctcccaaactgttgggattacaggcgtgagctaccacacccagcccataagcctgatttaaacctagtccacaaacacctggctttctctggcataatttgacagttgctttgagtgccagagaatttacgtcattgtgcctgggagctcacactcagcatggtttttgctttgactccacgtcccggtttgttgttgtttttagggaggggctttctctgtatgttgcccaggctggagggcagtggctattcacaggcaccagcatcgtagcacactacagggctgaactcctgggctcaagcaaacctcctgtctcagcctctcaagtagctgggattacaggcgcatgacaccgggctggcttgatgtcctgttttaacccgagttgtttgtagccagctttggcaaacctctcatgagcatattctgcaatgttataattacctgggtggtggcctgcatctggggatcacttaaatgctttcatcttcatgtccatctaaggataatttcaatgagaagcttctaggtcatttccatagactcctcttcccctcttgtttgtattacaaacttgtgtaaaagaagaggattttggagagagagacttggattcaaatcctagctccaccgttagtcatttgcatggccttgtatacccttgctaagcctcagatctctcacctgtataatgggcccaatagtacctgcttgtgggcctattgtgaggatttttgtcaagcgtagtaacacactcaggaaatgggagctgcttttgtggttgctgttactgcagtgattcccagggacatttgatattttaaattacattggaagaattctcatatttttttcacaggcagaattggctcatggatcagactaaccagatttatagttaaacatgtttataaaaaacatgaagtcatgtttttttaaatgcagcaggaaagcaaatcattaggtctaatttgttaggctgagaaaacactggaatgaaagtgctgttaacaaacacttagcgtaggctgggcaataatcacatgtactttagcttgaaaggtttgtgtgccctgttggaagggtttgggtcagaggcctatgatggcttcattgaaaatgcagagttggacatagccatccctacaccagcatcgtgctgaaattaagggggatagacttcaaaagaaattttgtgttttacatcattgccatgttttccctttacaatgcatgattaattttaatttttctaatgcatttgtttttgtcaataaaggcagaagatgaggaatgaaaacaagagctaatagtaactatcccacttgacccaatgcttctgtgaccagaagctggtcacttctgggttgataaaatgggagcaataatagcacctccttcaaaaggttgtagtgagggttaaatgagttcatgcagatgtacttagaacagtggttgggacatagtcagtgttcagcaagtgttagctgccatcctcctcctcgttatcatttgtaataggagcagcagtacggatttttttttttttttttttgacggagtctcactctgtcacccaggttggagtgcagtggcatgatctcagctcactgcaacccctgtctcctgggttcaagcgattctcctgcctcagcctcccaagtagctgggattacaggtgctgccacacccagctgatttttgtatttttagtagagacaaggtttcactatgttggccaggctggtctcgaattcctgtcctcaggtgatccacctgcgttggcctcccaaaatgctgggattacaggtgtgagccaccacacccggccggagcagcagtactgtcttaagagtaggaacctgaagcactctaaaggtgaaataatttcctcaaggtccaatggcaagtggaacagtccaaatttgaattcggacagatgatttcagagccagcagtctgaattatgcttttcaaaatgattttgatgttgtacaagtaagacttaatatttatatcaattactgctatctttctaaaaggcaaatttgatcatttttctctcacttaaaatccactagcccctgggcttctcaagggtggaagagatgtttcattcactgaagtagttctaatacctggctccatacctgtagcagcaaaggtttattgatcaaagctgagacaccctctcccatccataaaaggataaagtccaaactctttggctttttttttttttttttttttttttgagacagagtctccctctgttgcccaggctggagtgcagtggtgcaatcagctcactgcaagctccacctctcgggttcacgccattctcctgcctcagcctccccagtagctgggactacaggtgcccgccaccacgcctggctaatttttttgtatttttagtagagacggggtttcaccacgttagccaggatggtctcgatctcctgacctcgtgatccacccgccttggcctcccaaagtgctaggattacaggtgtgagccactgagcccggcctaaactctttggcttgacaccagagcaacccacggcttggccaccatctccagctcagcctggtacccagcagttctctctctgctccagctagggcagcacattggtcattgctttctttggcttgaaagatcctcttcaaggttcacatgtcgctgacaatctcctactcttccttcaagacccagctcaatgtcacccactcttagaattcttctcctgcatcttccctattccccaaacctcagggcagaacctgtgggtgccttggaagattgctcactgagggtcttcagttggacctcaaaggataggtaggctttgggcctgtgaagaagggaaaggtaccttagccagagtaacagcatgggcaacacacagacctggagaatgaatggctatgagagagatttcactaattcctccaaatcattattttctccagtgtgagttgtattatttcctcctccccatgcagacttaaattctaggggtgtgctttctttttctctccttttttaagagatgggagtctcactttcttggccagctggtctcgaactcctgccctcagtgatcctcccctcttggcctcccaaagtgctgggattatagacatgagccactgggccagcccaacggttgcactttcaatacaggtggagagtgtccctactgcttttcctgatccctgagagggtctttcaaaggagatcacagtagcaattcacttctttggaaaaaccggtccaagtaaggaaaacctgccatatataccctgcatgtaagacagagtagagaagccactggccaggatgctgggagaacggcattcttatcctaactccgtcactcactaactttcagactagaggcaaatgcctcagcctctctgagattaggtttcttcatctgtaaaatgggtatcctgtggcctgcctggcccaattcccagtgctgtggtgaagaccagatgagcaacgctctgtccctatctagctttgagacattgggaaaggcatttaattactataccttgaattctttggtcatgaaaacgaggccaagaatactttccagattgtttggctatgaggattagatgaagtaacatatggaaaatgcacagtacaatgcctggtatatagtagatattcaatggatattcttttcttttttccttccttccttcctctctcccttcctacctcccttctttctttccttcttctttccttcctttcctccttccttccctccctcattccttctcctttgtttcttagttataaaaataaggagttagaataaatatcctctcattaaatagtctaactctgtgccttttaaaaaaaattaaagatcatgttttattaatgagatattatttggaaagccaaagaaatatattttccaagtaggagggagaagatccagcttttttctgccctgggagctccagaagtttaaggcgaaatgataaacatgtcagaatgacttctttatttctatttataatctttgccatacagctcggtggatggtgaggtgctttttccagcatagaaactttccttggccgaggaaaggcaagaataaatacttttcctgggatgagtccattaccggtgccctctttccaatattcctccagattgaaatttatgcttaaaaatccaaatgagttaggagagactgtgactttctaaagcaaactcttttgcaatgctattttactgtgaaaagtcagcgctatttttcttttttaagttgtgatggctgcatgtggatttcagggcaaagtgggtatatggtaaccctgaggaattgtctctgatcaagaccacaggagaaactttcccatctcagcagggcctcttaagccctaaatgcttcccttctctgcatcaccactcagtggtggctgaggcaggctaggctagctaccactcacagttttccagggagtggaaagctctgaaatcaaagaaatgggtccttgagggaggcaggaaagttgtctgtctggatgtttcctcggacctctgtctgcttcctactccagggcctcctgcaggcaggtgtttatgctgatcattaggatcttatcacctctcctctccttgcctcatttctgcaccacctgggccagtccgcccacaaataagccacacctcctggcccaggtcaagctacttgtcctctgggaagccctccctgattactccagatatcagaattttctttcctggaatctttaaaagattgaatcatctccactgaatgatctcctccaacactctaacctgaccctgtcagctggattgaaactcttctcgtatatgtttgcatgaggaagggtggggatgggtctcaggacgggcactgggagagaagatagaggtcaaacgagggtgagaggacattgtgtccttgtacctgcacagctccaagcccagtaatgagcacaaaccaggtgagcaatgaatacttgtgattaggagcctacagtgcaccgttactctaggagagtaactgcaaacaaagcggcagacggggttctcgctcctcaggcttcagcccagagatcttatttatatgcctgaacagagtaaaggtaagtctattattatatttttatgtttgtaatatatactctgcctacttccagaaaagaatggagttggctgacagtaaacagtttataacaaggctatttatatagaaatagaaacggaaagccatggtgaaggaggaaggagctaaaatgacgataccttggctgatgtaattattatgattatacacagcgtggagctggggatgcggaaggctgtgggacaggctgccctggaacatgtagtgtctgtcatttgaaggagaagtgaggagaaagttgctcaaataattggatattgcttataggagaataggatttgcataaatgatgtgtgagtaggctgggcatagtggctcacacctgtagtcccagcactacactactgagaggacgaggtgggtgaatagcttgagctcaggagttcaagaccagtctgagcaacacggcaaaaccccatctctacaaaaacaacaacaacaaaaattagccagccatggtggtgtgtgcctgtagtcccagctactcaggaggctgaggtgggaggatcacttgagtccgggaggtagaggttgtggtgagcggtgattgcatcactgcactccagcctgagtgacagagtgggaccctgtctcaaaataataataataataataataataataataataataatatgtaagtagaagcagagaggattatgggaacatttgggggtatgtggctgtgaggatcctgacaactgctgcaaagatgagcgagaactgcaatttaggaggctgcggtggcaaattgtggctttattcttggatgattgtgtttggtgcttctgggtcaattttcagacaatatttaatttttcagtgagatctatgacttgcttaaatgcaccacttcttgtaaaaattatatgatcagagcatatacatttccattttggcaataggtgttggtcagttaatgtaaaaggtttcagtgtttcttaattatttaacctctctgggcattcgtcatcttatttgtatgatgtagataatagcatttttcctattttacgtggttgttgagaggatccgatggaatgactagctgaaagtgtttgtaaaagtcaggataagtaaagcaatgctgcaggaacaaacaatccccaaatttcagcagcttactacaaaaaaatatgtatttctcactcatgttcatgtccaatgtgtgttagcaaggagatactgtctctcacagtcatgcaagaccccttgctggggaagctgcacctccatatatgcttctaccatcaccagggcagaggagagggagcatggtggatcatacactggctcttaagacttcacttgtgtgacatatgtcacttctactcatgtatcatcggccaaaccaagtcacatggccatagtctcacttgaaaaggggcaggagaagtgcaaacttatcatgggcccaaaggagaagagaatcagagtatttctgaacagttttaattttggcacagacttgaaagtacttagaattagctccaaaaatatatgaatattttcattctccaagcagctgtatttgtatcacaacggaagtcctgaactctaagctgcagggagcattactgatgtcagaatagctcatcaatttcaacaggtcaactccacgatgtagcagtggtccaaactgaagccagtgcaccacttactagctactgcagacagactggagaagtctcacctcgtgccaactcccactgattgttggtggcttctgggagatttgtgtaaaggattggttctggggcttgtagagaaagagttgtaattgattaataatgtctaacatgggaacaagaagtggggagtggaagccattgccaggcttttgtcaaccttaatcaatcgcatcgctcagagggcttcacagtagctgttgaaaggatttgcctacagagatccatcctggggagtggcttccaaactcctctcttcccagcgtgcattacagggccagtccacagcttacaaaggaccaggttatctctgcattgtcccaggttcagcccagcctgggcatcttcagtcttctttggctgtaccaggtaacacatctttctagagaccctgagagaatgccattttctgagtttccacaggctagccagaaaggctgttaaataactcacccagctagttctttccaaaaatacccagtcctatttttaaaatggaggattatataattcttcaactggcctcactcatttccctttttgcatagatgccatgcctgtcagagtgtggttaggagctcaggaagccatggagaggcacaggatttgaaatctgcagtctcatgagacaggaagttgattccactcatggcagggttgggtcctgtctagtggatggtcactcttagggatggttccagatgtcttgctgggttcggcttgcttatgtttgctttaatcaggatgccagtggtgtggttcagaagttgcttttcatctgggatctttgtcatatccattaatgtcttgatcatgacaggatgtgacctggaatgggaacattggtacaattcctcaaatttatgttcaccaagaccaatgacagcacaccctgagtattccccctttaccctctacagcattcataaacagaaattggggactttaatcattttaaatgatgggctagattgctttcagcctattttgttttaaggaggaaagaaaggatcttctcttagagaaagaggaagggaatgggggaacatttattaagcacctactttaggcccatgccaggtatttcttatacattatgacattgatcctcatgaatatccttgagctatgggtctcaataaccctattttgtggatggaggaaactgaggctcagttaagttggttgacttggtcacttggtcacaataggacagagtcaggattcaaaggcaagtctgtctgaaaccccttgacttctgcagtcaaccagagaattgaattgtagacatctcaaagtggccagcatgacaagggtgggacagtgaagctcaaccagcctttctcttgcccatgttaatctttgattctcggctaaggtcacagctcctgctctggactgttccagaattccgtggggctgtgcaaaaacatgccacctcttctgtctccctctctctctgagttggatgtttcttttccctgactgattttcctctatttaatctggaattctccagggcagtggtattccatggtagtgctgctacccagactggtcagaggaaagtgggcagcctgttccttataaataccgtgagtcacatgtcttcccaactgccaaaaatattcaagcagagcccagtattcctttggcctgcataaatttctgaggactggtagcatagtgtatcctttatattcatagatgcgtatgctctcctggggtcttcttagcttaggaacctggtttttgatgggtcaaggttttttccttgattcatccaacctgaaccacagtcaggatcatcagttacaaggagtagcagtggatcacagcataggatgtggattcaggagggctggcttggctgctgactagccaagtgaccctgaactactccctcaactttctgattctcagtttctgagtctgtaaaagggggtaataatagttattaagggcacaggccatagaagctgatagatctggatttaattcccgaggacagtgagaactaggtaactgtagttaagtccctcaaccttttcaaacctcagttttctcacctattatagaaaagaaattataataatacttaacccgctgggacgctgtacacagtaaatgaatgtaaacatgggaatacttaggacaatttctggtatttaataaatgttaaatatgttttgaatattactgttttatgttattattaactagtttacaaggggaggatcaagtaaactaaaaatgtgaaagtgtctgatacagagtttggaacccaaaagatgcttcaaaatagtgaaatttgcacttcatcataaagatgtgaaacctttgagaaggcagtagttggaaaggaactgttcaaacaactggctctgtgctggttgctcagaatttagagatgagcttcactcatctgctggccccttggagcacataatctcacggggaaatagctgctggcaggatggcattgtgaggatgcagacaactcagaggaatgagggagcagggagcatgggagactcattatttcctggcttattgcattcaggaaccttaatttctgttttattcctggtggtttgatctaccagtgctgtcagtgaccagaaagagaagcagaggtcaagttataaaagttcatgttaggaagttatgacccatatatagccaacagctgtggaaagcgtttaggcaggagaaaggatgagtacaggtgctttctaggaagatagttctggcaactacgtggattgggtagaagcaggtagataaaagcagggagatcggcagggaggctttttccatcaaccaggtgaaaataatagggtccgaaaatagaagagcatattcaagaggcctgtgagagatgagtagacaggttcatccaagaagacaggctgaagggttgccactcaatcagggtgtgagaggggacagtgtgagggagagggaatgaggtctttgggggagaaaagacctttgtgtatcccttacatctctttctctccattggaacttcttctaatgggctacttagaggtgcccatgggccatggaacaaattggggctgaaaggagaaggaggactgcctgaaggcacagctctgtgtggcagatccctgaaagggactctcaggacagtctccccttgggattagaaaggtatgcatgtcaggagctcttggaagcacttgaactttctagaggccgccatgttggaaggctgttgtttgccattgggcacctgaagagtgacacagctggttttcttttcctcctggttgctgcaccttgagactgtggtgctatgattggatcagttcatcctcaagtggagaataactggaagtgtgccaatgtgtcccagtgttacctgggatctgacagcccctgaagccattgtacatccaactggcttcgacagaagctcccagtcaagactgaaactttgatgcttcttgtgcacagcttcctggctcccccagatgtgtttcccatcagtcccagtgccgagcccagagcctggttttctgcaggcactcagagcatggctgttgactgaatgcatgagcctccctgttgcctgccgctggggctaccacctcagagaccttgcaggaagtgagggtgattgatgtttgtaatgacctcatggtgttttgacagtcttctcatatgtgcagtcacagctctgtccctttccaacccaaatccagcctgtgccaggcatcaggtctctgaaacgagggccaggttccccttggtgtggattcatgagcctccctttaagctgtcactgtccggttcttatgcaggctctgttttcacaagacccagtctttctccttgattttccacatgaaggacagaaaagattgtgaataagctcagagcagaaagctctgatctgacattagcagtgtcaataccacattgaaaacagtggcttgcccagtgatggtgaacactctaaggtggctcggttttcgtaggaccaagcacagctgcttggctaacgatttggttttatttcctcctctcatgttgtttgtggcatcaaatgaggatatttccactttgagagtgtccctctccccaacgtggtgccatttggtttatatgccttgattgacttccatctgctgccacacaggacacctcctcactcttgagcttttcaaacagatggtcagaaatgagagccaaatttgagaaacagtcaaacgaagtgagaacatggggctgggagtccaggggccagaatccaggcttggatgagctactgactgattgtgtggtcctgaaaaattgctgaatgtttctgggcatccgctattttgcatattaaaataacaataacaacaacaacaacaacccgcaatcctttcttacgctaagatttaaatgggagagaacagggtttcaggaagggaaatggagaaacggtttgtttgaatttcttgtttaaatgagagtatgcctctgtttacacccctggggagtctcggcctgtgtggtttttacagatatttgtatgtgttaattccccttgagctaaacacaagtcgttccgttgatggcaactagcttcagacacagttggagtccccagagggttggccaggagcaaagtgtgtacccacgtgaggcctttggagatgatgccgtcagtgagaggaatctgccctggcattccagggccagaattagttggggcatggatggagacttgggatcctgttgtcaaccacagaggtctcctgatgtggctctgcagggacttttcagtcttagctcagctttccaacaggtccaccttctcccctagaccctggggacccagtccctttccccttctgtaatcctcaaaccacccacgccatcacttggggtctcctgtcctgagactagatatgaggaggccccattttcccaactcaaccctgatggtgggttccagctacaccaggtatgggtaaatcttaacagttttactaatttttaagatagggagaggtgataagaatgttctgtgagttgtatatttggactgaggtcaaaatgaaggcacttccagaaggtgaaatgatgaatacaagaaaaaagacgatggacctttctttcacatttacaatatgcccaacagaaggccaggtgtgggaattctctcatccacctgtaaactatccctgtctcacagatggggaaactgagcacacctgttaagtggtaaagctgggatttaacccccaatgtgcagactctaagaccccagcacagcatcaagaaggggcctggtcaatgcacccctgaatttggcatgtctgaagcactgaactctccctgctgttggggctataagtcttttctttagcctgggacagcaattaggctttgtcttgcttatcagcgcaagtgagaaagaccgtgaaggcacactggggggccctggggacgggtgttgtgtttgatgagtgacatctgcctggagtttgaaaaggggaagtgagggatgtttgctttatatttcatggctgtgctataagattcgaggcagtccagtccacagctgcagctcccccaccctcacctgctggtgcttacccactagtgccacctgctcttgagggtggcatagggtcttttcttgtttgggcctcagattctcatcttttgggcttctgggtgaaactgtcaccagggcagtcccctctgtcacagtctcagctggcatccctgaagagttctgcttgttgctcctgtcctctcctcttaagacccaagaggacagtctccagcatcctctgctccagacccgcagcctcttgccccatgagcacttggagccatccatgtccccagccactacacctcaattcaacacatttggatattctggcctctatttggaggggagggggcaggaggtgtgcacattattctgacatcagcagcctggcccaacagggtggccggttctttaatattgtcttgattcactaattacattttataagtagttggaaagatggttactaaataggaaaggctcattgtctcttgtctttgattcttcccacctctttgaactaggtagggtgggtgcttatgtttctggttcccacatagtaagcagactagttgggacagactcaataggcccacttttctccagctcagaaagtgatctcgcagggcctgtggcagaagcagtgttttcctatgtttgggctcagcttttatcatcagattgggatatatgaagttctggaatattcttgagctgtgaactgtgagcttgagtaaaatagatcctttgatctccatttgggtctgcatgtattccccaccagctaaagagggaggaaggaggtgtcatcagcaccccagcctgctcacatcttacctatgggctgtcataacaaacttgtgatgtaggtttgagaggtcttgatatcaccatttataggtgaagacaataactaagagttaactgtgtaccggatgggcattgtaccactatgaagtgtgtgtgtgtgtgtgtgcatgtgtgcgtaaaacttcatttaataactcacaacaaacctatggtagcattaccttcaatttataaatgaggaaactgaggctcagcaaggttaaatgatgtgtcaagaaaaacacatagtagtgaatagctgaaccaggaaaaaaatgtacaattcctaacttcaaggcccaagccctttcccccaccctcggtgaagcaggcattattttctcctcttattcttgtaaatgttaataagaatttccaggacagggctgggctagaaagtcctctgtctgacctgctatttaaaccactccaaatgctgagcattggccaagccacagcatgcatggccatggttcaaacaagtaagcaaagccattgcgccttctcattagcattgggaggagaacaaaagtgagagaggcaaagtgtccatcagcgatttcactttgaagccaaggccctggatttgcatctggccagatctctcagatatcattcagggcacagaatgggtggcaagatgcaggatgacccctcgggctttaagaatgctcccctttccccaactaagatctgcagatagctctcctgtgctgttgctccgactgtcctctgaccatcacagactgcccgagggcacatttgtctgttattgcccaggcaacagaaacatctgagataaagaaaagattgtgggcacctggccttctctgtttgtatgacatacagactcaccttttagactctcccacctacaattgtacaaattgttacttaggaacttcaccatctgcacgtctttcttctgtgcaactccatccaatcattttcattcatttagtgttaaccatctccttctgcatgctaggctgctttatgcatggtagggaattaaaaatatatgtgatcctactctcaaagatcttatattttagatagtgtattttctccggatgctacaaatactgcattatttacaaaactcatttgctgtcaagttaccagtctgggcatttttgttgtctgtttgggtttattctgcatgcagctcttttctctcatttcccctgccgccttcctggtgcatagtaacctttagtggccttggcttctatgaggcttctacatcttgccttagggtaagcaaagggctactttagaataagctggtcagtaccaagaatatcacttaacactttttggtgctgtcttttgtggtcatagcaagggttttcctggattttcagtgtacaaaccaagttataggtttatgcagcaactcatgatcagagcgagtcttgcagagaactaagacctgaacttgagctatagtctcttggcttttaaattatgcaggcctcaaattgcagagcctccacctttcgctgttataattagggtataataagtattatataatcatatgtgccagacttggggcagaggccacagtcataggcaaaatttggcccacagaagtcatgcatttggccttccagggatggatgcctttaactgtggcattcatgcttcagtgtgccctccagttggccacagtccctactgctccttattgcctctcacccagcctctcccttcatttcttagctacctgttccctgatgggtttgagttttcaccttctgtttagcataacatcctcatttaatcctcttaataactcaaaaacattttatgggtgaggaaactgaggcccatttagaggttgtgttacttgtcccaagtcctacaataagaagcaggactgaggatgggtttactctttctaaggtcatagttcctgccctttcactccatggtgctgcttccaacctgcttctttatccattagacaaatcactaccatgcacagcagtgggccaggtctcacctggggataggtgacgtgtccccagtgatgattttgttccaccatttgaagcacatgattaactcagttctttttacctgatatgagaaagggagagaaagagagaaaataccactctgtccctaaggtggtcaccatgggagtgagtagtgggagaagggaaactggcttataaagagatactgcagtatagcctgatagttttcagtccaaagtcaacgacctgcacagcatgttaaacttcctgaagtgggcggatcacctgaggtcaggagtttgagaccagcctggccaacatggtgaaaccctgtctctactaaaaatacaaaaattagctgggcatggtggtatgtccctgtaatccctgctacttgggaagctgaggcaggagaaactcttgaacccgggaggtggaggttgcagtgagccgagatcacaccactgtactccagcctgggagacagagcgagactctttttcaaaaacaaacaacaacaacaaaaaacttcccccaggaaaatccattgcaaaccaccaaacagattatattaggaaacatattcctttgctactgagaattaggaaaggatgcatctacatacctgagacttggagaaattttgacaaaattatcatggagaggagactagagtgaaaaatctcctccctccatctccctcaaaactgtggaattcccaagctggcaaaattaatttactgtcagtttatcagtttggcattcctgtagcaaatctaaattatccccatctccccttccccatctctgaaagatttgaaacagtctcataccacctctgtcagaatcctaagtagatagatccagttgaaatatttgaatgtgaggcatgaaggaaaaaagtcattatcaaagggttaaaaaaaggatttcatgtgaagaaaagtgctttggttttccccaagacttcttaagaatgcaggccgggtgtggtggctcacgcctataatcctagcactttgggaggccgaggcaggcagatcacctgaggtcaggggttcgagaccagcctagctaacatggtgaaacctcgtctctactaaaaatacagaaaattagcccggtgtggtggtggatgcctgtaatcccagttactcgggaggctcagccaggactatcacttgaacccagaaggtggaggctgcagtgagctgagattgtgccactgcactccagcctgggtgaaagagtgagactctgtctcaaaagaaaaaaaaaaaatgccgaatgccacgcagcagtcccagaatccagaggtgaaaagtctggtccaaacatcccattgtccaaaataataaggcaatacacaatttgaatcatttgatcatagagcttgatttgaaagacatattttgaatactagaagggttgttcattccttagaataaacctatggctaatcatttgtaaagtgaatattcttatataatgaattttttctggtgatgtaaatatatacttcctagcctatttatgaatttcacacatggagttttctaaaagcagggcgtagtggaattgaatcttctaagaaaaatagcaggcactttgagatgacaggaactggttttcttcctcttgtttttctcagtctgtgttgtaggtgctgtaattaaaaaccaggctttggaacaggtctccactggagtggtcttgagtagacttacaaatggctgcaatgcttccaatggcagttgatctgtgtgagccaggagtggggtagaaatctggggactggaatttcagtctgagttcaggattgctcatctgcaactggcaacaatggcctcttcctcttttccctgcacagaaagtggtctgtgaaattaaagtggagaacagctgctaggagctcatgctggggacccacagtggaggccacattttgtgatcccagagggattcccaaacccacctgacagctgctccaggccttctctgttctcctgatccctgccctgatggaggcctgacccatctggccagagtgccttcaactcccaccttgaaatacctgtcaccgcccacatccctggccttcctcaggacttagaggttgaggggcttgtctttcccgcttgggcccttccctcccactccttccgtcttctgggttcctgatacctgagcaccctcatacgattcctgatcctcattcagctgctgctgttgctcagctgatgcctttgggaatgagatgcctgcctctgccacccttagctccctgtcacacggttcctcattagctcctgctgtctcacttccacctttgtggttccacagagcctctccttttaaaagctacccacatttttcatccttctggaccgccctgccatgttgggcaccccttagatcagttctcaaaccatattccacggaaccctaggatttacacaaaggtttctctggagttttgaggaaaggaggtaataagctggtcttcaccctatttcagccagtgcaactgctcttatcaattaactactgggatgttatgaggagtttcttagaacagagatttgctgcacaggctctgggcctaatgtagatgcacctagaaggcctgctctggggctgtgcacatcagaggcaggaatttctgcaggttgaccaaatacctttaaggagtattgggtttttatggggagtataggaaggctggtaaaccaacgcttcctttatgcaatttccccaaatcttactgtgcaaatctcttctcacaaatctccaggcagttatcttgggactgatgcttcttgacctagtaccatagaagggaggtagcgggtgtgtgtgtgtgtgtgtgtgtgtgtgtgtgtgtgtgcgcgcatgtccttccaataagcaaccaggccactgctccagaggttctgaccactcctaacccagtttttatgttataaggggatctgggaccgctctacacaaatgactccttgtctcacaattcctcatgggccaagtttcctggtccaggctgatggctggtcacttttacatccgcccataaacttcctttgttcaaccctcctattggtcattggctcagcattttgtaatttactttttttcatatttatctgttagcaacaagacacagttcaacttcctgcagtcattactgtaattagcataaagcagcagcccctgactgtgagcatgattcctgtagtagcctgtatccacagttctttgtctcttacagtgtcagactgagcccaggatggagtaagagccaggactggcatgccctggaagtgcccttctggttctaggactgtgatttctctgagctgtctgtctgcccacgactaaggatggccccagagccctggagctcaatgggatcaaccttcctatcccctccctcctgcctcgagggtactttgagcaggaaaggggcaccttggagttgccgggggatgaacgtctttgtgtttttgttttttttaaggtgactccctgcattttatttctttcatcttgtgagctctttggaagtctttgtgttaactggaaataaaattatctttatttttaagctatgtttttagcttatctaatcatgaccccatgggctgagtaatgttactagatagcaaggtgtggaggatgcagatgacctggttcaagctgtggttctgctacctgcttgttgtatgactaggcacatctgttaacttctctgaggctcagtttccatacctgtaaaatgggggcaataatatctgcttgtatccattaagtcattcaacatgtactgaatgttttatgtgtattttgcctatattaatcatgtactgggtccagcactgaccccctggagttcacatgtaggcagaagtaaatcaagaggcagttaccgtgctgggagattatgtactgttagttttgagaaccttggtctagccttccaacctaccttccaacctggaaatttgggaggtgtgggaaacgggtgacctcaggagactgataggactccgcgtgtttgagaaagaactggcttttggtctaggtaggaggtagagagcactttccgtgaaggtgttgaggtttaggcaaggttgtgaattatagaacaggagctctggaaggtatcgtgggagaggctcagagaaagcatgggtggctgggggattgggggaggatagagagagcctgtgaggatgtctttctggcagtgtctaaggtcacgtgacaagcagagctcgatgggctcagtgggccacggcacttcccaagccgctgattccagtttcacagtgggcacaggagtgcagattagggctaagttggggggacaggatgcacagcgtgttggctcaggatctctgggaggtggcacctgtgacctgggctaatcatgctactttcagagtcaagcagcaagccaatgggtagggaaagaccagcctctctgaactgggtcccacgtggagatagtgaatacagggcaccggtgagcattccagatgactccaaagccccggctggagtatccaggttccaactgtatctccttacagagacctgcagctctgtgtgtccagaggggttcatgctgggcaactgtggtggtgaaggtcaggtgtcctcaagctgaccacaagtcacagcttgttgtctttcttgtcagagggactctgggtgcagctgctggccactgggctcattcaagggcgttagtgccaaattccttctccctggccttcctcacgttgatctgtgtacaaatggagctgcaggggaaaggtgggtttccaaaaggagtgacagtgaggaagagaccgagatagaaagaacctgttgcaaacatttcccatcttttgtcattcaaatggatactgttttaagtatcacctgttctggtcataaaagacaagaatgtgtttgtagaagcttctaggatgcctggcatacaccatgcaggaagcacccttccaagtcggctggcctgcttttgttttgcaaaatctggtttgaaaattttgcactttccatatttagcaacatttcagtgggtgtgaatttatattgctacagccatggctaaaagtaattcactctttgatctatgttgcctatgtgttactatacagacaggacttcaggtttctggagctttggtttaaaataaactctgtgtgtgtgtgtgtgtgtgtgtgtgtgtgtgtgtgtgtaagagaaacagacagactctagggcattgctagttccaattggtgggacttgcttgtgacctgtttggtccaaaagttggtcaaaactgtagatttgcaaatcagcaggattcactcccggctctcattttgatgtttcaaatgagtgcatgttgtgcatttgaattagatcggaatgagttttgggggtctcactgagacactcatacatgtcaggatttgccactttggaagctggaggcagttaatatgtccattaacccagggtatcaaagtggcagctcatgagtcagatgtggcctgcagttgttttgttcagcccatgcagtcttttaaaaatctggaaaattcacattaaaatccagatattccaggtatctcttaaggcttaactttctcaaaactcagtgattttaaagaacagtgacatttatctgtttctcaaatctgtgatgtggacagagccaacttgtctctgttctgcatcagttgagaggctggggctggaagcatctgaggctcactcactcacatgcctggcagctgatgctggctctcaaccgaaacctccccaggggctacagtggcctttccgtgtggctttctcacagcatgttggctgtgttccaatggtgaaagtccacagagagagagagagaccccagtggaaggcacatcatttttctaaacgactcttggaagttacacttctgctccattctggtgattagaagtcagtcattaaagttagtccatatgcacagacaggggaattagaccccacttttttatggaaggactatcaaagaatgcagacacgttttaaaaccaacatgccaatctctcacttctcttgggaaattcggggacccagcaagatgtggcctgagcagtggctgcccctgtagacagggcatgggccctccagtttgctgggtcccctccacccaccgagatattgcacccaacccctgtaggcatttcagcttgggtctgccactctaggctttccatatctgagggttcagactcacttttcagctccttcaatttacaaggaattctcatttttgaaacgtaagaactcagaatttactcagaagtaaatttttttcctccaaaggaatcaggttatatccaaacaggtgatttttctgagaaccaagcaactcattacccatccttcctttgggtatcagagatgcagtttggagggctgtgtggggggcatgggcagaggcagtcaagatggctctaccctcctcatcatcatcatttgtagtaggagcagcagtactgtcttttttttttcttttttttttttttggacagagtctcactctgtcacccaggctggagtgcagtggcatgatctctgttcactgcaatctctgcctcccaggctcaagtgattctcctgcctcagcctccttagtagctgggattacaggcttgcatcaccacacccagctaattttttgtatttttagtagagatggggttttgccatgttggccaggctggtcttgaactcgtgtcctcaagtgatctgcctgcctcagcctcccaaagtgctgggattacagacgtgagtcactgtgctcagccttcttcagcattattgataattggggctggatgactttttgttttggcgggctattctgtgcattgtagggtgtttagtggcacccttggccttcatccactaggtgccaatagcacccccacctcccagttgtctcccaaaatgtctccagacatggcaatatgtcctgagggggttggaaaaagggtaaaatcacccccagttgaaagccactgatttctctatgtattctggataggaaccctttgtcagttaaatattttgcaaatatctcctcccactctgcagcatgccttttcaggctcttaaaggtgtttttgatgaacagaagttcttagtgtagtccagttaccaatcttttttaaaattgttagtccttttttatttctgttttacacatctttgcctgtcctaccttttcttctggaaactttatttttgtctttcacactcagagctaccatctacattgggattgactttttgcatggccaaaagtagagtcaggcttcatttttaaaatatggctattcaattgactcagcaacttttattgaaaacattactctttccttattgccctggggagccacagctgtcataaatcaaatgtctataatccgtgtggctgtcttttattctgtttcattggtccatttatgtatccttgtaacaatactacgctgtcttaaagacttagctttagcatatgtcttgaaatccaggagattaaggcctcccactttgttctttgagattgtctttactgttcttggcccttagcagtttcacacaacttctagaatcaccttgtcagtttccattaagggaaacatagtggcgttttgtttgggattctccctatcagtttggaaaaaaaaccaaatatttacaatattgagtcttccaattcatgaagataggatctatccattatttaggcctttgaaaatttgtctctttctcaaaaaaatatttttttgctttaaaaaaaagagcatgtggcagcttcttatattactcaagtgttgttatttttcaaaatagggattgtttgcatttttaggagattatgtttcttggactaaaaactattctgagtcctcattgcagagagagagagagagagagagaaagagacagagagcaagagagcatgcagccaaatttcttagcttggcattcagtgggtttagcaagctagctccagcccgcctcctgccctccttcttcctatcttatatatcttttcttttggccctatgaagctactccaagttcccccaattcaccatgcttttgctcctactgtcctctctgcctggaatgtcaggaagggcttcatggagaatgtagtaccatcgctgagttccaaagtaggaatttctaggcagaaacaagggaatacccatgggccaccaatgcctaaccaggcccaagacagggtaggagctcaatcagtatctgcccacctgggatatttgtcaggtcccgggtctgggtgataggcaggggccccgcatggccacccttcagcctgcaggggcagccaatctctgcttttctggctcaaagaaggaagcagtttgtctcaaacatgtggaatctaccagcctgtctttccgtagtctgcatccacggggtgcccacaaagtctggaaacagatattattttgttcattacagattggaaatgtccttgaggacattgtgtatgttcacctgtgtgtccagggttggtgggcacctgggatttcttaggggtttcctctttcttagggaccttgcaggctggtgctatgatcatccacagtctcccttctcccacggtctgtttctctctgcctcactgttgccacagacagtctggacagattacagctttgccccaacttgaaccatggatttttcttttcaaaataaaacataataaaattttggtgaaaatggaaatatctacatgtttatttttaagtgttttttttttaaatgttaagttttttggttggttgggaaacatcaaaataggtcatgtgtaacttggtttgctcataaaaaaaaagtggctcatacttggtatatttagagatgagacggaagtgatttttttttttttttttgtattcagtttttctctatttttctttttaaaccaaaaagtgcttggaaaatttctccaccctatccactgttagtgcattttcctggccttaaaattctggtaaagccttctgttgcccaaactgaagagttaagtgtgctgagcttggcttgaccttcagttctgcttctctaagagcgaaaaggcatctttttcaggactggtgctattaatgggctgaggaggacagtgttccgaagggcagaaaaatgccttcctctgtgagaaattaaggcagtgatttcaaacaaattgtttcgccagtgtctggcatccctgcgggttgtctctggttttcgtccacttgtaccaaatgcattcatgaacatggcagacattttgctgaaggtctcacagggaaggacggcttggagacacacattccgtaaaaaacagcttgaaaaccttcctcaaacgtttctgttttccatagttccttttgccatagcgtccaatcctatgagttcttttgtttttccttttcctcctggattttctgcctccttacctcctgggttttctgcctccttacctcctgggttttctgccagccttaccctctacctccatcacatccaaaggcctcctgcttattatgcagagaaatttggtctggtgtcagcttccacgcccagattttaatttttttatccaacagggcattcagcaaatgaagaccctgcagttaccaggaccagagcagtaggaagttataagtgatattttgcagcaaggcagaataatgtgataggattgtaagggctaagcagtggagtcctagaagatgtcctgagcccctggctgccttgagttctattttggaaacgttatttctaatttctccccagtccctagctcccaactaccagagctggccccagaaccactctccccttcactgggaacagacccacatccaacatccctattctatctgcaatcatctgctgactgtggtctaagggatgtgtctggcccccagcacaggccctgaggccaaggagaagatgaggttgctaaaactccagggcactaccaggccctcctcagttatctgtggttgctcagaatgatttgcttcataagcactccgagacgcacagatgggggagagtgatgtcataccagattccatgcttgatagacagacagatggatatgcaaatggaatgaacgagagagatgggaggggtgtaaatgatgggtggtggagtctagaatcaggtaagcagagggtttcccaggctcctttggaagaggagttcaaaatgacaagacgcaaagaacaccattctttatggcaacctggtacagaacacaggcaccagctcatgtctgtcctcacaacacccttgagaggtcactggagcttaggaaaccaagggttgcccagaaacatacagtcaaaactcagattctaatgccagagttccagccacttcaccagactgcctccaagaagttgccactggttggctggaagtcttgttccaaatactatctgatgatattttccttcttccccatctgccttccttcaagaggaagtaaacagatattctagagcatctgaaccaagcatctttgcatttatttggggacattattagtgtcatttcttttcattcaagatgccagctgttgggggcaaagttgccccgctgagctcatggtatagacatgggcagttgctaaagtaatccctccccacctggaggtttcaccttgcatcccaaataccacccctgcacagactggggtctctcattgctttcctctgtgccctccactggccacaccaacttccttgtttacccatcttaggtgagaacaccctttctcccatggactcctaccaatgcatttcccactctgcccctctggctgtcccaggtgtgctgtatgcaacagcccccccaggtctctatgctgctgttccctgccccagactctctgcttgtccagaccctgacctgcgatgtggaagtgtgatagaggagagggaattccaggcagagtaggagcggagatgacccatccacatgcgttccactcgcagggagcggagggtggggacgagtcattcatagggactccacacccagctggctggagcaacgggtcttgcaggtgagcccagcctgtcaggaccctccttcctggcagggaccctgctggcccgtgggtgatgcctttctccttggcgctgcctccagaactgtggcgaggcagccgttttcaaatgtttgtttgggttttctggaagctctttgaagttggaatgaaaaatctgcctagtggttctgaaatggcctctctggctcagcaggcctgggtcctgcatcattcccttggttcaaggctgagtgcaatgccaccacccattgctgcccaaatatgatggttggattgaagttcccagatatgtcatcaggcccctttaagaagttctctttcctctatgttgttctacgcgcctcatccacctcactagtcaggaggtccttgatgataaaaccccccgtgtgatttgtctttgtattcccaagacctatcccaatgccctatactcagtggcaaccactattgacacagctctttaaaattcatagagtacttccatgttctctcttcagaagtataaggaaggcattcccattttgcagacgagcacactgaggttcagacaggttgggcaacttgctttcagtgactcagctaggacggggcagactgagtatttgaccctgtgtggctccaaaatctgtgctccccggcttctgccctgctttccctggacagccaaagcgctccgtgcatgtttggtgctgaggtattagggggtttaagtcacagggtgtccagcactcaggagctgaggccacccgcaggcgtcttggttggcagctgagccctctgaggtaacaggaaatagaggcagcgggactcaggctggggttgaggtgttcggggtagcaggagaggaggagaagctgctgaagtggtggcagccacactcagtgaagtaagaggcgcccctgcccagcggcctgaaagccacttctcctcagccagcaggaatcgcattccatagcacaggaagcctctgttcagaggaggtccagtcaggagtgaaggctgtggagtcaaggccgtgagtgtgtgtgtgtgtgtgtgtgtgtgtgtgtgtgtgtgtgtgtttaatttgtggcttcaacagaggccagacttaagaatgaatgaaagagacaaacaagggcagcttgtcccaagtgggggagggagaagtgtggacaccagcttctgagggagtcaagtgcaaagtcctgggctccctgcaaaccgggccctgcaggagggccagcacccgcagcagcagcagcgaagccggccagacctcctggccttcctcacagcagaagggtgggccttcagcaacggggccctgtgcagtgggaaaaggcaacactgtgcttgcctttgtggctaacaggggctgtgctgcaaatgcttcaggagagcccctgcaggctgagagggacattagaaagttccatcctcttcatctgcccacctcccttggactgtgggctgtgggctgcatggggcacaggcacagggctggatgtgtggggcaattcaccctcccaggtggtcattccttctggctttttatttgtccaatattccttcagtctcgattatgtcccaggcaaagtgctagacacgccacacacattttcttcccttgccctcacaacaaccctagcaggttggcactatccaccgcattttatagctgaggacacagaactgtaaaaatgaagaagtgacaagtccaaggccacccagctgggaaaggtggggtgggacttgaagctgctgagtctttttgaatctcctcctctaaggggccccccaggccagcagggaagagaaagtcataagcacccaattctggtagaaggcagaaagtggaaaggggggtgtctaagtcccaaggtgcttcctaggggctcggagggtggccccagaagaccccgggggatcagtgttctccaggagtcttgaagggcaagtgtgatgtggaagtgtgatagaggagagggaattccacacagagtaggagcagagatgacccatccactcgcgttccactcacggggcatggagggtggggacgagtcattcatggggactccacacccagttggctggagcagcaggtcttgcaagtcagcccagcctgtcaggaccctccttcctggcagggaccccggctggcccacgggtaatgcctttctccttggcgctgcctccagaactgtggcgaggcagccgtttttaaatgtttgtttgggttttctggaagctccttgaagttggaatgaaaaatctgcctggtggttctgaaatggcctctccggctcagtgggcctggctcctacagcattccctgaagaagtaaacaggcccgtgcagggggaaactgcaggggccacactgctggactgctgggtgtccctggcccgaggcgtgggaggccggccctgggccctgcagcgcccgagtgtttgcccagttgccctggacacaccagcctggggtgcagggaccactgccgcctgagagggagtcctagggggtccaggacaggaagccagcggtgttttatgttacattaggaacaccagcaggctttctggagtggactgagccttgtggtcaagaaataggcaggcttggaggctgtcgggcttcccaccatgcagccaccatgcctcaccttcattagctgacaaagcagttctctgtcctcactggccacaaggggaggaggacacagcttttggaaacctccaggctgctatcctggaacctggagccacggccagggacagcttgagcgtcccctcccctctcatcttgtcctctgaggggtaggctgtgccccagctgaacggggcacctgtggctttgccagctgatggctgccatgtgggaatttggacctgggttgccagatcttcagattttccagcaaagctggaaatccagatgtttgtatgaaacttccccaatttaaaaaatgtttaaaaacactatgcaggacgacctatacacatctgcaggccagactcggtccctaggcagccagttagtgacctctactctctgccttcagacacccagggccacctaaacaaagggcccccatgacagtgatgggttgggggtggagaaaatgctctaggagagaccctggagtccacaggcaagaagggcatgggatcatcctttccctgctcctcctaaagggcaggcactgctccacttcttggttcccgtccactctgttggtacagacatgggggaagcgggcaagggatatgacttctagaatttggaccttgtttctctctcaggcacttccacttgcccttaacctgatctcctgctggttcagtccacctggtatgtttatcaggaggctctttctttttccttccttctcttctctgtccatggctttccctcttacaggtccttggtagctgccggagccctccctccagggggtgttggccaatgacaaggctgggaggccagggccgaccaatcagagcagttggccgtattgctgggaattaatagcaacattgcatatggggaaagcatgagatttgggatcacacagacctagattcaacgccttccctaactggccaaaagaccttgagacagctgcacaaatttcctgcaactctgttcctcatctgtaaatggtgatactaattcctggcggggattacatacaaagatgcatggaaaatgcctagcacagtgcctgggatatattaagagctcatccatagttgtcactgatttgagacagtgacaactatggatgagctctcaatatattcttgagttgcatgtctatcagaagatgtgatgccaggttctcaacagtcaacttagaaacacactcttggaatagaaacacgttgggtaccatttgtacgtgtattatatatgtatttccttttcatcttttacctattctcttttaaacagagtggtggattaaaaggtaatgaattacgcacaaagtagcttctcacttctcactgcctttcatttttcttctcctcctacttggcctttctcccccaccaggacctttactctggtcttctgtgtttgctaattcattagtcaacaaatgtttactaagcacaaagactcgttctttgttctcaagggagggaggcagacagatgattgcagcaaggttgaggataaagagaaatccggggttgggtgcggtgactcacacctgtactcccagaactttgggaggctgaggcgggtggatcaccagaaatcaggagtttgagaccagcctggccaacatggtgaaaccccatctctactaaaaatacaaaaattagctgggcgtggtggcaggcatctgtaattccagctactggggaggctgaggcaggagaatcgcttgaacctgggaggcagaggttgcagtgagccgtgattgtgccattgcactccagcctgggcaacaagagcgagactccatctcaaaaaaaaagagagagagagaaatccaggatgtggaggggcctggagtgcagaagacatctgggagatcttagagagaggcttgaggtttgagagagaataagggtcgtggcagcaggaatgaggaagagatggattcatgagacctgtagagggaccttccaggaggtcccaggggtcagtggatgggaagagccaagaggaactcctcatttctgtttagatgattgagtggatgacattgtcaccaactgaaagcagaagcagcagagaacatcttgctagtgagaggtgatgagctggaccatacaaggtgacctttaaaatgctggtgggacaaccaggtagaaccatcccataaatgataacagtgaactcactacatgccagactgtcttaggtgttgtatcttatttaatctccacgatggccttatgagggaaggcaccatcatgatccttacttttcaggtgactattttaagggtaagaaatattaggtaactcaccagtccagtggtcactggttcaagtgagtagagctagtctgactccagagcccatcttcttgcccatttcatgtatttattcaattaacatttattgaagacctactatgaagctggcaccgtttagatgctttgaatatatcagtcaagaagacctgccttcacgcagctcctgttctactgcgcacactgcctctgctcagagacagctgaggatatggatgacagttctggctggaggggcaggggggctgctacacccactcccactctgaaatctcacttccagggtgagggacaggtgcttccttcacccacccacatcagtctatatccccatgctaaccattttgctttgtgccaggccaggtggcagaaggaagggcagatgcttgagaaggacagtcatagaatagttccttctaacccttttgtggcgtcagtctcagacggtttctatatggagctggacatatccctccatctctatcagctcatggtggagaccatgtgttgaggagatcatgaaggggctcttcctctgggtgctctgtcacccagcccccagcagcccacccaggtgtcaaaagacaggtctgcccctcactccagagaatagctaggatcctggtggcatggcactttggaaagtatgagacccctccttgttttacagaagaagaaactgaggcagggagcagccagtcattgcccgaggcttcctggcaaattagtgacagagccagttgagaatgcagcccacgtttgtgttgcttcaactcagccccagatccttcactctccatgggggctgctttggggaagccagctttgcacccccacttccctggaaggcagagcactaaggctgccacccagccatcgctcaggcgggtccacacagccccgggccaacctccctggcactcacacccagtgtccggagcagctggtcagtgggcgtggagctcctgcttgtgtgcccccacccctgtcgcgccctccccctgcctgggatgagctgcagctgcctcggggcctctctgcctgcgccccccagccagcctgtgccctgctttaatgtgtcctggggaaaatagctggcaatgctcaggcgacaagcaaaggccattttttaaaaaaagactaatgccaggatgagggggcaggagggggtggaaacagctgcaggctcctcttccaaatttagccaggtgactgctttgccctgctcctctttctctggggtttttgggtggccattgcctccatggtaggactgtgttcctgaaaaccaccccccagatgactcacagagctgtggcagctcagagaggaatgtctattcatttcagctggggctcttgtcagccagttggacctgaccagcagctccactgttgcagaattgggctgcttcctacttcctgtgtccccatccgatttcagggcctaccatccccaaagtgacagaagatagcatggaatgaggcagccatgcccagatatcagaggtgctgaaaacatcctgaggctgtgtagaaacacagcgaagattggggcatggagcaggagcaggagagaagccaggtggcccagccttgggttgggagaacagggcatggccccagccccagggtgcccatgggcaggactcagagccccagaaccgagcactcaccatgtccacttctcatttattctttaagtgttagaaggaccttcaaatcagctcatccagatgttcctaagtatgaatgatttgtaaaacgattttatggatatatatggataatatatatccataaatattatccatatacatatatagataaagctaaattgttctgcataaccagtaatttgacaattatttattgggggatgaatctaatgtctgaggaggaatacatttcaaaaatatattgaggccgggtgtgatggcactttgggagccaaggcaggaggattgcttgagcccaagagtttgagatcatcctgggcaacatagctagaccctgtcttcacaaaaaatttaaaatttagccaggcgtggtggtgcatgcctttggttctagctacttgggaggctgaggcgggaggatctcttgagcctgggaggtcaaggctgcagtgagcagtgatcacaccactgcattctagcctgggcaacaaagtgagaccctatttcaaaaaaagtacccagaaatatattgagcaaatatggtgctacatacagtgtggatgatacaggtagtatatgaacatggcactaaaaaacctgtcagtggagcctatttgagaaaatatgggaaatgctgatcatcaccttcctctttgttctggttttctggtcttcttctctggtctccttctccttggtcttcatccagggaaaacagacagttctatgaactgattttggtgtggtgggatctgggacagcaggcattccagcctttaaccttcccacagtgactttggctgtgacctgggatggagtgggcaggccataactgaggtggaaaatcctgtcagtgagctagatcgagtcattaggcggagctggatgggatcagagaaaatggcttagaccctggagtgtcacgaaaagacacacaaggcaactagtgaagtcagcagacattccagcacctgccctcctccctccatcctctagatctaggagactcctcctgacacacccacctcagacacttcagcctgtccctgttctgggcacgcatgccctctgctacatacactcccaccctcaacatcacttccaggctgagggaacaggtgcttcctttacccacccacctcagtgtaaatctccatacagaccattttgctttgggccaggccaggtggcagagggaaggggagacacttgggaagcacagtcatggaatactttctatctaaccctttggcagtgtcaggcccagatggtttctattatggaggtggacgtttcccccatccccataaactcacccacataggcccgtgtgggacatgcattgactcattcacttatagtcactcaaccaaccagagcgctcttcccccgtctctctctgggtcagtaatgcttgtcttgcaggtctccagatagcccgagacaggcttttcctcccccaggaaaacctttcctgtgcttcacctgctgggtggatcacctgtcagtagtgcttagcctgcactaatcatcgttgtaggtcagaggcctctggagcagctattcatgtgcttggccgtctgggtcaagggaactgatgttcaaacaggatgtgtgcaagctcatcttctcaccggggtggtactgatactgcccaggaaactagtgaggagtgaacttgatgagtaacagcagcttagagacagtgtcatctcttttctcagacccatgtggaagggagaaaggcctgcctgccggtggtcccgatgccactaggtggggcaggatttgagtgatcagctcaagatctgaaagatcaaaggtggctgaaatgaaaaggacgctttctaagcataaatgtgaagtcctaattcctggctcagcaactcagctgttgatactagagcctaataatcacttgttgtggtgacaagacttgggggctttactcagtggtttccatttcctggctgtgcactggaagccctgagcacgtttttaaaagatcaagtccagggttccatcccagaatgttcagaatgaagatctccaggaaaggacttaggaaattgtgtattttagaagttctccaggtggttcttatgtagcttttgattattttggaggtggggtgggcaggacagggtctcgctgtgccacgcaggctggagtgcagtggcacaatcttggcttctctataggaaagccttgacctccccagctcaagccatcctcccaccttagcctcccaagcagttaggattacaggcatgcaccatcatgcctggctaatttttgcatttttagtagagatggggtttcgccatgttggccaggctggttttgaactcctgaccttaagtgatcagctcaccttggcctcccaaagtgttgaaactgcaggcatgagctgctgcacccagcccttatgtagcttttggaaacaagtgaggagtgaacttagggctttatgggaagcatcaatacattacatcaataaaccaaatgtgagccaacagaaagcttccgggttggggtgcagtctgggctcaccacagctctagcagcgactcaggaccatgttgtgaagaaagtaaagatccagtcccttcactgctataccacctgggagtaggacccccagaatccaatatttcaggtatttcatctgctctagcaagatgcctttgacaaacagctgcaatttgtgcctgtgtgatggtcctagtcaccaagggtggtggccagcaaggctactgagaaaatagatcctcactccatgggctcagaaggctgatgctgggaccatcttctttcattctggcaaaaccgtgggtttcttcagaatgtcaaagtgcagaagggcgctgtgggtggcaggatgcttgctggccaggtagcagatggaaatcagtgtccctgcccacccaggaggagccaggagcagaaggtgaaacagtgagccgtggagatgctcgactcttcctgagattccttccatgatttccagagacggtgaagtcacgatgcacagctctccagcatgtgcatctcctcctcaaatgccttctgcagggacaaagaggactttatcctcaagagtgggacacagttctgtagcaaaatgtggcaggttgaatggaaataatgatcttcagaactttaagaaggagatgacccagatgaaatagaaattgggtaatttatcagaaagcctggaaaaacatctgagagagacccctgcaggagactgaggtctggaagggctgaggtagcgtattcttattctggcctccacaagccgcatggactcctcctatctggcctcgtcacctggcctccaccagcctttttcctatagggaagccactcacgctccacagttctgggaaacggactgatgagagatttagttctggacagccgcccctcaactgttcctgttccatgctctgacacctcgggttggcctcagacaatctactcaacaccttgtaatacatttatagacctgtggctcaggaaaagctgtggggaaggacagagcttcagcaggccaagtcccaagcctgtggggccttttcttcttgaactcatgcagtggctggcatttctagggagagggctgaagttcagttcacatcgtcccatttatggaggatctctcttggggttattcttccaaggagcatcagcaagaaaggaaggaagccatctcttgatgtcctggggcactgcctgcccatagatgagaaggggttcccaggcggaaagaaggggtgcaggaagctgcacccaagaaaccagtttccccagcttctgaaagtagggccagccctgcaatgtggggtgcagctgcccaagaggggctaaatggaccttgcagggtcactccagatgaatcttttctgcactcccagaactcaggcctcaacctcctcatggtcagtgtgttctctgatgagcgtgtgcgcgtgcacacacacacacacacacacacacaccctggcttcagggatctctttagaaattttttttttttttttttttttttttttttttttttttttttttttttttttgagagagatagagccttgctctgttgcccaggctggagtgcagtggtgctatcttggctcactgcaacctctgcttcccaggttaaagtgatcctcccacctcagccacccaagtagctgggattacaggcgtgcatcaccacagctggctattttttttgtagagatggggtttcactatgttggccaggctggtctccaactcctgacctcaagtgctgccttggcctcccaaagtgctgggattataggtgaatgagccactgtgcctggccaatctctttaaaatatgtctagagtccatgtctctctcttgatctccggactcacctatgcaactgcccactgagcctctacacgggccacctgaaagcatttccaattcagcaggaacttccagccagctgggaaatctgctcaccattgccttggcgaggagcctactctctactccagccacaaacctctgagtcaccctggcctcttccctcttgctcacccacttcacgccgtgggatcggttaccaactctgccagtgacctgagggttctcgggccagttcactccttaggcccagttccagttactcgtgtgctggacaaatgaggtggatgaggctactcttaatctaaatgtcctgtgtggttgagcagaatgaccaccagagagagagagagagagagtaagcaagtaggttaactaggaagtcagctgtcaaattgatgttatcagggaggttctcaaaaatgaggccagattgaaatatactaaaggaagtgaaatacccgaatgggtgggaagggattccaggcagggatgctgagcaagtgaaggcagagagacagagatgctcaaggatgacccaagagacaatgcatggcccactgcgcctgatacatgctagagatgagttggcccaaggtgtgatgagttaggtaagggccaccctctgctaagccatcaagagtttgtaagcagtggtggtggggagagggcggcaccgcaagctttagaacaagactggagcatagtgaatatgtgtttgggaaggttccattggcaaagcggtgttcagggagaggaggctgttatggctgtccaggcaagggatgggcagagcaggtaaatgtcagggtcaggggtgggagaggtgggagatgcacataggaggggtcggagaggtgtctttggcaggagctggccggggagtgattcctagtcaggggttttgggcatgtgtagaaggacagagtggtggcagcttctttattgtcatcttcttttttttgagatagagtcccactctgtcgcctaggctggagtgcagtagcgcaatctcagttcaatgcaaccttcaccttccaggttcgagtgattctcatgtctcagcctcccaagtagccgggattacaaacatgtgccaccatgcctagctaatttttttgtatttttagtagcgatagggtttcaccatgttggccaggctggtctcaaactcctggcttcaagtgatcccgccttggccacccaaagtgctgggattacaggtgtgaggcatcacgcccagccatcatcttcttgttattttcccaaggagacatgtcctgtagggtgggtgaggagaagccatgttgtcagggacttggctgctccctaaagttgaaggtgtggagggaagggggttccttttcactgcagtgatccccatggactcagctacagcctggctcagttttctcccaggtctgtcagctcacccccttactcatcagggctctgggattgtcagtgacagaaacccagctccaagccaacagagaaggtgaaggtgcagagaatccaaggtaggattgagaaacgaaattctgaaaacatctttgggggaggcaggctcagggatggctgaaagcagggctgcagggctccagtgccaacagggaacagggcagctgatggggctgctgactggtactgagtaactttcaccacagcaatgagactgacttcagactctctctatctccaagcccaggatcctgggaagcaactcattggtctggcttgagtcaggcattcgcctgtggacctgttggcaggggccagtgccagggtggtgctagccctcatgggagtccctggagtgactatgtgggagggggaggggcagggcatagaggaggggaggcaggcagacaatcctggggtcaccgcaactccacagcagggccagggagcaaacaaagggtgaacaggagacagggacgtggccagtgattggctaacaaatctaatccctctctaggtgaggttctttttagagttaacgtgagtcatttgttcattgatccgttgagcattgattctgtgattcatcccacaagcctttactgaatccctattctaggccaggccctcgatcacagatagaaaagggaagaaaataaggttccctgccctgcagtagttcatgttctagcatgggaaattcacgtaataaaattctataataataagagacctatgctgaatagaggtgggaaataaggaagaaagagtgattcattcttcttggaaatttattaaaggcttgatgggtagtagatttcctccaggcattggtgctggagaagagccttccagcagaaacagcaatgtgataaaaggcacagaccatgagctcacgttggacactgggtgggcagggggtcatctggtggtactagcgtggccagagtgtaagttagaaggtggcgtggggcatgaagcgagagaacaggtgaggttgagtagatatctaggggccacttcttgagggacctcatacagcaacacgggttttggaagggtgtaaaatacaagatttgcctttgagaaagactatcctggcagcagtgtaggcgatggactggaaggaggaggagactggagatgggctgaccatcaggaggccaccgtgaatgtcaggatagagaggtcctcctgcactgaagagatgatgaggaagtagaagactgtgggtagaacttcaagggggacaggttgagttcacgagcaagagtgagaggaggcaaactttgcagggcaggaaggagtgcttgattgagagttcactgctgtcttctgatggaactgtttgttccttggaacagcagagtagtgagaaaatgcagtggcttgaaattctgataactgggaccctggaacagaagtaccacttgctgattatgtgaatttggacaaatcacttaacctctgagatgtggtgggagttaaaccatgtagtaagcagatagcctgatacctggcacacagaaggcccttgaagtgtaacatttacatcagaatcagaacctttttggattccatggctacttccaatgtgtgtgtgtgttttttttttaagtggagaggtacgattactaaccagtaggagcaacaatattattctaggttggtgcaaaagtaattgcatttttgctgttacttttaatagttgcgtatcgaagacagcatttgcttttatggcatcggaaacattctgactcagcttactgacatttcctctgccatcatcttctttcatactgaaatgtggtttaaaatatatatatatatcatttcttcccattcaaagaagggtttatgcctctgctttcatgtcccaacatactttgagagatagtctcaccccctcccttttcctcttttatgccaggaccctggagaacagccaggtaaggtggtgcttatctcattttcagtcctgaaggaggaggaagatcaagtgtgtgcagcgttaagtgtctggaaggcgtttatttgattttcagcttgtctttgttccaacatggattgaatggtaaatacaggaaagtagctcccaataggcgcctgaatagctgaggggcaaaatgtcccggtggcccacacccacatgtaccatcatcatgagtccttcaagcctgcacagctcactcctgtccagccctgggataccaggtgagtcaggagaatgacttcctctgttcttacaaagtcctggccaccagagatggtactgttagcacaggagagacattgagaatagggtagaaatctatgcagaaaagtgtttgttgtggctgagagttccaatgcccatttaagaccctgggagaaaaaagtcagatcactcatgtatgggctgaagaactaagacttttggttgcaagtaagagaaaccaagttgagctacatttagtcaaatggaaaggggggaaaagcatggggtttggatttatgataaggacatagggagtgtctcctagcttcaaaggcaggaataaagccaggccgcaagaagggactggaaccaggagaaaaataatcagcccagctttggtcctttgtgcctctggtccagtctgtttcgtctgggagtcagaaatcttgctgaacaagcgtgactctaggaggtccattttgtgaaagggcagatcacagagagggctctggaacaaagtggagaccctggctcaaggcagagatttgggaagccctacaatatggtggtctttgaagccctaagaagggaattgacccaattcaaatggcatggatctcatagtaagaggtaggactacttgagagagaagatcaaaacagagagattagattccaagggctctagaacaaagctctaagggcgagcattgttttctcatctctctgctcccacaaccccacttcccagacttaaggacaatggtgtatacataagaagggctgaataaacatataggttgaatggcatagaacagacacttttatagatcaagacatggacgattttgtattgttcaacctaatatgtgatgcacgagcattgagttgaattgagaccttgctttgaacctttgttatgggaccttggggcaagtcatggtcttgatggtttttaaggttattccttggacccaggtgctggaagcacaacttccaaatgtaatacccagaagcaaactgacagaggcaggaacaagctggagtcagagagatctgtgttcagattccaaccaggcactgtcccctgggcctctgcaggccctcagtgagccagcgaggcctgccctgagatgacagtgctacctcctctctctgccaggaccactttctctcattttatggagaaaatcaaggaataactttttccaactgaagcctctggaagatcttaggcaacacggccgactagagctgaacctaggccagcatcctgggccacagctcagctctgcaaatgtagccagagcctgaggcgggggctcttctccctgcctggcaacttctcctggctataaaccaagcgtgggctgcagctcctgggagaccaggctgaaggcccaggagatgcttcaggcaatttgcagttgctcccttgaattccatttttaacagcatctgtagggcagggaacgcaaggctgacctgtgagcctggtgtcctgacttctcagggcaagactctttcaaaagtatttcttgagcatccacatttgttttcagcaaatcagtctctgctctgcccttttgaagaacacagctaacaatggaaaacaacttttatgtaagagagttaactgcaaaccgggtgctttcctaagcattttgtatatgttatctctttgaatcctctcgaaacctcaattaggcagaagatacttaatagccttataagctagacaggaatcttagcctaaaaatgcaaagggaagtcctggggagggaaaggagaaaaccaggaagaggaaaaataaatccacgagataatgttgtaaaatataatgaagccatacctattttaaaaaaacccacagaaatttcccagacctggagagccactaagtggcacatgcaggggtcaaactatgtctatggtggctcatgcctgaatcccagccctttgggaggccgaggcaggaggatcacttcagtccaggagttcaagaccagcctgggcaacaggacatagtgagaataaacaaattaaaaaattagctcggcatggtggtgtgtgcctgtagtcctagccactcaggtggctgagatggaaggatcgcttgagtacaggggtttgaggctgcagtgagatgtgatcatgccactgcactgaagctctttgagacagagtgagacaccatctcaaaaaataaataaataaaaataaaagtcaaagctcctcctcaccaacatatagtaacatttatggaacacatgcttacctcactcttcctcaaaactgctgtttgaggaaggtcctgttgtcaccagcatctttcagatgaagaagctgcagaacagggaggtaccagaacttgcacacagcagatgagtggtggaactgggaactgagccgaggacacctgcctccaaagcatcttgttgggttggagaaggacagtggcaaacacagctcgttctcactgcattttggtagcaaagttgtgccttctttttttttttctttttcttttttttcttttttgagatggaatctcactgttcccaggctggagtgcagtggcacgatctcggcttactgcaacttctgcctcctgggttcaagctcctgcctcctgggttcagctcctgtctcggcctcccaagtagctgggaccataggcatatgccaccacacttggctaatttttgcgtttttagtagagacggggttttgccatgttggccaggctagtctcgaactcctgtcctcaagagatctgcctgcctcagcctctgaaagtgctgggattacaggtgtgagccaccgcacccagcccgtgccttctttttgctcccaaatcccattttattggagttccctgaagcagtcatagtaaggcagttgtgtagtagagcatattaatgcaattggatatttctttgccattctaggaaattatctactgatacacacagcaacgtaggtgaatcccaaaaacatgctgagtgaaagaaaccttgtacaaaggtctacatactggatcattccatttacatgaagtcctagcagaggcaaagtgaatctatggaatgtttctggtatttctcacttagaagagtggttgcctcttgttggaattgactgggaaggggatgagggaactttctggggtgatgataatgttctggacattcctggggatctgggtttcagagacatatgcatttgtcaaaactcaacaagtgtgcattttaggtttgtgtgttttatttacatgtaaaatttccctcaaaagatgaaaaaaagaatatggaactctagttaataatatgcaggctgaagtgtttaaggggaaatgtggacggtggtgtcttcactttactgtgaaatgcatccaaagactgagattgatttctggatggatagatggatgtgcaataacacagcaaaatgttactggtagcatctaggttgcactgtattagtgttcactgtgagattctttcaacttggctgtgtgtttgaaaattttcatagcaaaatgttgggttggaggggaaagcgattatgtggaatcctggggtcccctagtggtgagttaggggtcccggagctcaggattgcaagctgagattatgcagtcaggaactgtcatccttacatatctctgtcacagctccctggccctgggtaagcactaaaatatgcattttcctgggtctcactttagagagagaatactgaggcccagggaaggtctgccaaggtctcccaggactagaacctaggactccctgtttctggcctctcctcccagctagctttatcagaacccattttcttccacagaacagggccttttgttctatagcccagggctgtaaatttcacctgcgtgcagggatccaggtaactgatcccatcacaatgagccggtggcacccagggcagtaaaacaggcctatgcgttagaaccccacctgccagtggcttcctgtaggtgtatttgaagtagtaggaaaccagagtggtttctacaaataaataacccaggaaaagacaagcctctcagatcaaagaaggactctggcccaaacttgaactaaaatcaagcgtgctctttcgactccactctggctgggcagagggaggagtagagaaagtctatctgctgtgcaaacattccctgtctctgcccttcctgggtttgtgtgagcctgagaacaggagcccgggaggaaggctgcactctctgaactgctgccaggccctgcctcatgacattccagcctggcttccaggcacagcaggtgccaacaaattggcctcttgtgtgtccgagcctaaggggctcattcatgggctgcacgcctgtctcagggctctcatgtaagccctctagggcccccagctctttgaggaaatttcatggcatcctctgtgtttcttggccctactggttaatattaatgcttcccaggggaaaggaaggagaatggaaagagatgcacagaagccagcagttctgactcctttcacggtggggaaggatgagggcagaaggtgtcttagagcagaggaaggacccttagaagttgaagtttgcaaacttcaccgtgcacattagtcactgaggattgccagtcagtggcctggggcaagacctctggtttctaacaggctcttgggtgatgctgatgttgctggtcccttgaccacactctgagtagcatcaccaacggccaaatccctcccgtcatgaagttaatggacaataagcaaacccattagtgaatatatgattataaactgtgtgaagaaaataaccaggatgctacaaagggtattgaggcagggaccttcagatgggaagaagatggtaggaaaagcatctgtaagaacaggactttagactgggacctgagggtgagtggagtagggaaagcattcccggcagtaggagcagcatgtgaaaagtccctggggcagaatcaagcttggcatcttcaaggaaatgacagagaggcccatgttgcatgggtggagactggcatgagatgaggctggagaagggtcaggccacacagggctggataaagggctctgacttcattcttggtgtgatgggaagcccttggaggattttaagcaaaaatgtgccacgattcatgctggtgggtctgtggaagatggattgggataaggtggggagtaggctggtgggtggttcttgcatagtccttcatgaaatagtcgtcaaccttagtggtagtaaagattttcattctttccaatgtgggtcacattttctaggaaactgcatgttttggggacatgatacaattgaggaaaataagtattcttttccgataaagtaatgtaaggcctcattaattaaataaacgctttatgagagcaaaaagacttggaaagaattaacctttggctgggcttggtggctcacgcctgtaatcccagcactttgggaggccaaggcggatggatcacctgaggtcaggagttcaagagcagcctgaccaacatggagaaacctggtctctactaaaaaaaaaaaaaaaaatacaaaattagctgggtgtggtggcacatgcctgtaataccagctactcaggaggctgaggcaggagaatcccttgaacctgggaggcagaggtttcagtgagccaaggttgcgccattgcactccagcctgagcaacaagagcgaaactccatctcaaaaaaaaaagaaaaaaagaactaatcttcatctttccttctccttttggcttcttattagttagggttgtttccatagtgaatgtcaaaaacacaattcaaactggcttaaatgaaaaaggaactttgttggctcatgcaattgaaagtccagggatagtagtagcttcaggcataattgggtcttggtgctcaagtattagctttctccatctctaggctccacattcccctgtgcaagcttcactcttagagaggctctctcaatatagaggcaagggtggccccagcaactccaggcttgccaaccacagtgggatgagatccagctttcccagtagttccagccaatgtcccttttttttgacttgggtcaactgaacatccctgcaccaatcacagcagccaggggaatggatctattcattggccaggccgggtcacatatctaccttaggagcaaggcgagtgggtcagcccccattgagctacatggactgagagtaaagggaaagatggctgcaaaggaagatctaggggctgaattcgggagcaggagatgaaactcacaaacatcctctgtgggctcctcattcattttgaatgtagcaccttctcccatcaatcattaaggctggttccagttcatcaccttttgttctaaacctgtgtctggatcttgcctctcctgaagacatctagttctgggagcaggaggcatcttgctggcaatgatgccctatctgtcccatctctcctgctgctcccagcagactatgcctttgcccaggtcagaaggcctttgccccacaaggcccttgtttccagtttcaaggatgcctctagttcacagtccacatgccggaaggcaatgatgggcctaccctgggtctaaacacagatctcaatccatggcatctgtgctaactccaggtagacagtatcagaatcgaatggattatagagcacctagttattgtgcaccaagaactggagaattgcttggtttgaaaatcccttgcacatttagtggtcggaagtattgggatagtggagggaaaaagcagtttttcctttagttggtggagagaagtaaacacgttttcccctttctgctgtacctctagaagggttttacctgcatcagaatctttcagggtgtctggcaggggtgcacatgcagattactgagtcctgccccagatccacagtcagaacccaaagggtagggtggatctgcctgcttgtcaagctctgcagagtattctccctgtctcccactcatacacaggcacacacgcacacacacatacacacacagggacacgcatacacattttctagacctttccagctcaggttgttggctccgcctgctttcaaggcctctggatgagtctctccagtgcttcattccccctgttccttcatttaatttggaaagtgggtgctttagaattacacttctatcatacaaaagtagtttgaacagacaaaacagagccacacatagaaccactccaatagcagctaacattttccaggatcttctggttttgagaacttctttcacgtccaggtgtgtatggtgtggcacacttagctagaatccagccttcttggaccctatcacattacctgtcttctctctgggcactagaatattaaggacagttgtaagtcgggcccacacagtctgagatgatgtacttgcagtgcctggaggcatcactccaaaaggattagctgttagtgtgaaagccatggatgggatgagaatggaacaatgcttgctgcggactttatttaagccagcacggcagcactgaaaacaccacacccagtggtggggattttcaatgcccatctcacctaccaggcaatcaatgcagcactgagctgagtgggcatctgctgcagagaaaggcatcgtttctacagcatgccctgcctcaagcactatgcatgtcccttctctcccttcccacccccaccttgcctgcaccccagttttggccacctgggtgttcacgtcttatcaccctcaacttaccctaccccttagctgtgctgacccctctgccctctgacctcaccacacagctccagcccctgcctgctgcactccctcacacccttctctttctgtgttccctctgcctgtgtgttcccagggcatctcctaaccccattgtctcttccttccggtgcctgctccaatgccaccttatcagagagagctttcctctcctctgcttgatttctctctgtagctctttgtgtgatcagacatatatgggatgcctttccttgcttattggtttctattcttcctcctgtaacccctgtctccgacaactggactgtgagctctaacctgatccagagcagggtcttttcctgagttgtttcctgccgtgtctcaatgcctagaaccatcgtgcagtaggcactaataataaacacggattgattaattaaattccagcagagacctccaggctgcactcctattcccctcccattcctcctccctgtccctggcagtggtaccttttaaaagtacacatcgactcactcctctggctcctcctgtccgccagtgcccccacacccatgctttcaggataaaatccagactccttaactttgcactgaaggtgcttcatgaatgaaccctgcactacgctcatctttgctgatccttggcacctgctgtattctccaggcatcctcactctccttaagcactgattttctcctctttgaaacaaaggtcttcctgggactatgagcctcccttcccacattgggccaggaaccccccagtggggagaatggggaaaaaagggccactaaataacctagatgaggagtgatgtgggtcttgaccctggtaggaggtgatgggaagagggcagggggcatctggtagaaatttttcttgagccccagaaacaagtaggcacacatagaataacttcaggccagaagaaacgccaagccaactgctgatgctagtattttcagttaacaaatacaactgatgaagtgtttattgctacaatcacttaccaagtcagtacagtgcacacaaccagctgggaagatgtatagcccagtgagtagacttgggtagctccaagttctgactcagagtctcaagagaggctcatcttacctttgaggtctttgaactctgtgatctagctgctcttggcatcacctgaccttttagctgccggctctgaggagccagcccacactgcatttgcccagggaactgggaataaaaaggctcatggtggggcagcctcctgcgctccccttggccctggcagactttccctgcctgaacgagagccagctggcagagccttttgtggatgatgcctggggaagccagagttgggactcgggtcaacttgtctttgacgtcaggtggcagctcctctcctgaaatacttacttgcatccatgcatccactgatttataaggaggctgaggagcctgggttgggctggtggaatttaaactgtctttccagatgaggctcacttgtttaaagaccattggtggactgggaaggccagacagatgctcaaattcaggaaaggacaatgaggcttccaagagaggaatcccttcatggaagaagccatcctgtgccatgcagactcaaagtcggggctggagggacagtcgggagaggtttaaggtggagagcgacccagctaccagagcagcattcattaccaggtcctatgtgtgttgaatgaacctctctgtcagcctccctaataccatgggagccaggtcacctggctgtggaacatgtaactgagcatggactctccctctccatgcagataagatgggccactttcactgtgaggtaggaggcagcttccagggcgggctggactggggggagaatccctcatgtcccatgcacgaagatagcagcaggtggatgaggagcaggggtggagatggaacttagctaaacccccagtgagaggctgtggctgtgaaatcccaggatatttgcagcatgagctgggacaggattcatgtaggcacccgtggggagtcccagaaatacctggaggaatcatgcaagaggcctgtcctatgggaataagtgaatctcagaggtgatgggcgtctatggtctggggactgagggcagggaaaactgggaacttggcttaccttttatcgtgggcagcaccctctccagagagccctgggattggcgggagaggccaggacccttcctcgctgcagcctccagtcactccaaactgtaggaggggcaggctggccttggatttggtgagcctgggagcacctgtatcagtaacaagacttcccctctagctttatgatgctgggagacaaaacaagctttaacagggaaagtactctttttttcctcaattgagggtaatgcttaaatgacaaaaaaagagtgatgtattttttaaaaaatctgcttattttaatgtctccaatttctacttcaaaatacacccacctgttttgatagagggtgttggacaaggagttgaaagttgcagagccggcaaatagccagattcatttggcaaacacattcagtcagtccaatgttgactgggcagccttggtgtgccaagctactgaactaaggtctgttgggaaggaaaatgtgttcacggagtccctgccctcaaggagcccgcagcccagtgtggaaaatgttcaggaactctaaagacagaatgagataagtttaaagaagggtttgatgactatgatgtggatgcagagggagaaggaattgataggaaatttagggccagggagaaccctctaggggaggtagaaattattttattttgtaattaaaacaaattatgcatttcaaaagcttgagcatggcagctgggaggatggtctggaagagaaaaaacattgaaatcaaggaagcagacatcagaatggggcaaggcctttgggggcccggaggaagttcgtgggactaagaatagatctgctccctatgtgctgcatttccatcaccccttctcctctttcacagccactagcccagcaggtgttgtgttttcattcatggaatcccccagaagggtgggagtttaatactgggatgggtaaacaaggccatattttatcttttaatccctctcctctccagtcctctcctttgccttcctctcccctcccctctcttctccctttcccttccctcttttgggatctgtgctttgcttgaatgtgagaggcaagcaaagccccctggaataaaacaatgagccaggctgccgcgcagaaatgacctcttctcataccctggccctctgaggtagcaggaacctccctttatccgcccctgaattctctgctagaaggcttactgttccaggaccccaggactctggcttggtgcatctgccacacttcacataatccaggcagaacttttgcctagagcccagtgagggactctcattaggtcatatttgggttttttccccaggtcataaacatattgcctgacaggggtgagtttcctgcataaagccctctgtggcaagctttcaagaaagcacctcttgtttagatgtaactctcatctgaagatgcagttctaccaatttattcgtgaaaaaggctaccctaaaagcccatgtagtaagccaggctgacggtcagctgcatccgtcactgcccgggaggcaaccctgggtaatggcgacacactgacctttatggagtcttcatccgggccggcccgtgtaccacacacatcgcatacatcatctcatccctctaacagacctctaagacagctattattcccccattttacaactgagcggacagaggcttagattgttgagtaattggccaactacacataccgcccttaagtggcaggtctgagacttaaatttggatctagcttgtgataaagcctgatacattttcaaatatttaggaggttgacacttaactgatggctgacaagtgtctgtttgagatttagttaatactctgtaactaacagttctcaaacgtaagcgcttatcagaatcacctggaggatttgttacgacagctttctgggccccaccctcagatttttctgagtcacttggtcagtaggtctggagtgggactgagaacctgtgtttctaacaggtagtgtgatgctgctgttcagggaataccaccgtgagaactgtcactctgaactgaattgtagctctagtgtggaccttctacaccactctgagtcctgaggctcagagctgttccatagaagtctctacaatgataaatgtgtcctcaacctgtgatgtccaatgtagtagcccctaaccatatacaagctgtggaggacttgaaatgtacctagtgcaactgaggaactaaattttttatttttttatttttatttttttgagacagagtctcgctctgtcacccagactggagtgcagtggtgcaatcttggctcactataacctttgcctcccgggttcaagcgattttcctgcctcagcctcctgggtagctgggtctacgggctcgcgccaccacgcccggctaatgtttgtatttttagtagagacggagtttcaccatgctggccaggatggtctctatctcttgacctcgtgacccaccagcctcggcctcccaaagtgctgggattataggcgtgagccaccgcgcccggccaaggaactaaatttttaattttatctaattataattgaatttaaatttacatagccacatgtgattcatggctactgtactggacagcatgcagccatgtccagccctttgaacgtgaggacttttttgcttatctgtgatggtggatatcatgaaaattatgcacagcccttttttttttttttttttatagctcatcagctactgttagtgtattttatgtgtggcccaagacaattcttcttcttccagtatggcccagggaaaccaaaagtttggacaccctgccagatttatcattgtggctaaattatttactcttacgttaaatctcaagtgagtaattacaggctgacttttcattaggacatatctggtttgctgggagggtcatgtgcattatttagatttcagtgcctgttgcacaggggtatgggactgggggatccttaagggtggagatcttactttccttttcccccagcaccagcgcagtggccgcccacgggctaacgatgtgagctgaatgaataggaggatgtgaaatagtttcagagctacctttctcccagctgcaattggcaaaggctttggaaccatccctcccctacagctgattggtggggtgaggagggatttggacttgatggcacagcaggatcaaatgggattcactctgccatgcttggggatagggcgagtccgtgagggtgaatttctgttatcacagggaactgtagcatctctcctctttggctctgtaggtggttccccattggaaatttcccgtatcaatgttttttaggaaaaagataatttaagactcttggctgggcacgttggctcaagcctgtaatcccagcactttgggaggtcgaggcaggtggatcacttgaagtcaggagttcaagaccagcctgaccaacatggtgaaaccccatctctactgaaaatacaaaaaaattagccaggcgtggtggtgggcgcctgtaatcccagctactggggaggctgaggcagagaattgcttgaactcgggaggcagaggttgcagtgagctgagatggcgccactgccctccagcctaggtgacagagtgagactctgtcttaaaaataaataaataaataaataaataaataaataaataaataaaataagccaggtgtggtggcacatgcctgtaatcccagctacttgggaggctgaggcaggagaatggcatgaacccgggaggcagagattgcagtgagctgagatcacaccactgcactccagcctgggcaacaagaacaaaactctgtcttaaaaaaaaaaaaaagactctatggatacataaaaggtacccaaggcatgtgtttactatccaaataatgatttgaagcgttgcctcaatagaaacagaagaaggaatacatgggcctagtcctcccctctctcgcctttcctcccaagcaagcagagtgacagagaagatgacatgtgtcccataacttgagctcagacagcaattcccctatcagatactggttcaggtttccatttagttgctcctaatcaacataagcaattgtcttctactctgtgggcctcggtttgcaaatctgtaaaatggggagggtgggggtgaactagatccttgctgcttaaagcatagtccaccaacaagcagcaacagcctcccctgggagcttgttagaaacacagaatcagaccctgccccagacctgccctatcagaatctgcatttgaacaagtcccctcccctacactgataggcataagaaagtgcacgctggaataggtgtcttatttcagctcctactgtctgtgagcctgaagctaaactgcaagttgttttatttttaggaattagaagcacagtttctggaagagagaccaggctttggagggcctctggggtttttggtctttgcagcaatgggagaggtctgggcaggtgtgttttcaaaaggtaaaagtaactcatgccagagaaacatgtttcttgcagcatcctgggatgccctgatctgcagaggcaaagggttttctaagtgcttctctccaaggatgcaggctggggtgccctgtccctggggtccccgcacagcagccccaaacatcctgtctaaggagactgtgctgatggcaagccctctgagaaagggctggcaggagggagctcagggctgctggaagttccccaggcttgggactcttcctgtgtttatctgtgatccagaggggtgcttggattgttctgtctcccatttccttcttctctctagggatactgtgtcaggaccaggtgaccagagagatgcatttttctgtcaggagagagctgggcctggggaggaacaagtggcagatggaggcggtggggcaggggggcggcgtgtttggctgccccttacctgacccaggagaggaggacagggctcttactgggcaatgtcagagaagggtttctgcatcacaatttgtcagggaagatttctgtcccatgggaacaagacctctgagctctgctttcctgtttctgtggtttctggtgtccacaaagatagacttttgggtccttagccagaaaaggatcttagtggaccctgtgcaggcaatccagtcctccaggagccacggcatggatttaagagtccatgaacaagaaacctaggtcacaaaggaagggggaaacatagaagcttctctgaccaccacaagaaagctggagggagattcttgcccaccttccccaagctcacccaggcttgatttcaagatcattattttgtctaccaggggcagagaaatggctcaaatcaagcatttactcttcccagtaagccttggtgagagataggcagggagtggtgttattgttcccattttacagaatgtgggttctggagccagaccacctgggttcaaatcctgactaagccacctactagttctgtaacccttggcagcacctcagcccccaccccagacctaccgaatcagaatctgcatttcttggcaagtttcctggggaaacaggtgcacgctgaagtttgagaagtgctggctgtataatctctcatattcctatcagcgcctacattctgagatcctgagattatactgcaaataatttaatccttagaagcacaacttctggaaaagaaaggcaggtttgaactttgtcacctacttcctgtgtgtccttgggcaagttagatactttgtgcctcagtttccccatccataaactagagataataatgatacctagctcagagtattgctttgagatagtaaattcgtcaatatatgaaaagtgcataaagcagtgcctcgcacctaacaggaccctggtagtgtttgcttcaattattactattatcattacaggtgagaaacctgtgagcctcagaaaagctaggtgatttactcgaggatgctgtgttagtttgctagggctgccataacaaagtagcacggactgggtgaattcaacaacagaaatgtatttactcatagttctggaggctagaagtctgagatcgaggtgtcaggagggttggcttcttctgaagcctctctccttggcttgaagcctctctccttggcttgaaggtggctgtcttctccctgtctcttcacatggtctctcctttgtgtctgcatcttagtctcctcttcttatgaggacaccagtcatattggattagggcccacccgtatgacctcattttaccttagttacctctttaaaggtcctgtctccaaatacagtcacattctgaggtgctgggggataggatttccacatatgaatttggggagtgcacaattcagcctgtaacagatatgtaaccattaagtgacatataagcataaacaaaactgtgcccaagagaattcacaagggtgtggttgattccaaagcctgccacctctcaacaggagaaaaactgacttatattctcatatgtcattttaagggaagtgtccagagtcattaggctcaaataaaatatttcccttgaactttgctaagtgaagcaaagagtgactgtctagattgtgctatcctgtcaatggtaccatctctttatcttcctttgcctaagaagatagcagcttgccatttgggagtatagttccttgtgtacttgcctctctttcctcttgccagtaagatactcgagaggcaggattcacatccgattcctctctgtacctcccaaagctcctactccagagaccagtgatatatatgagttgacatttttcaagttagtatatctcagttgaccctcacaacaatagctcatggttatcagtagtattattattcccatgttcacaatgagaaggcacagagagattgaatgggctgccagaggtcacacagctgatgagagccagagttggaattcaaacccagattttcaggtcccatctcccatctcttctttcatgccatggactgtccttgatatcaagagccctcatggcttgagcactgaccacgggtcacagtgtctcttttgattctcacagtgaccctggaatttacagtgcatcatcccagcgttacagacttttaaatggggtacaagtggccaggtggcaccctccatgtgagctgcatggctgggattgaagactctggagcccatgctcctggctaccccaccgtcctgctagtcactgagctgaaccttgcctaggtttgcctaaagcaagaatcacctcatgcagggtgggtagggacggggatggctgtccctctgctgtcttatcccaggaacttccaggtcaccctgcagatctcatctcgcctcctgccttacagcttaaactgaccctttctcttacctcctgctacctcttcttccaataatccctagaacagatcctagcttctgtagcctctctgggcagcaggaatcctcatccccatgaggttgaggatgccgtgggagtgccgttgctctgcagcctctcaggaggctcctgtaacacttggctcctcttcccctgtctccccttgctctgcaggtgacaagccctggactccggtgcggctgggcctggggctacctgaagggagagcagagactcaggtgcccggtgagcaatggcagtgaggagaagcagagagcaacgccagcaagcaacgcctcctgcccctgcttttgctcttgtgtctcttgaccctgtgaggtccagcaaccatggggactgagcagcagttggacttgggggcagccgagcttctggaaaattttagcttgttattgtgaagacttgtggaatatcccaaagtgctggctttcggaaaagggtgcctacattttcttctgcacaggctctgctgaaggagtttgctgcactcttgaaaggacaggcaagctcaggtcctcatggctcgatctctgagcaggcctctaacccagtgaggacagcggtcaaccagtctccagctaacagcttcctgcagagacttccagcattgttagctaacatgcactcttctgaggccttcaacagctggaaactgtttcaggactatcttgccagctaagaagcggaatcccagttcttgttgccaggaagcttttaatggccaatggagaatgctgtcctcccttggtgaaagaattcccaaggaaatttgggaatcttttaggattcacttcaatggaatgtttcttgggacatgtgtcttcaggcactggaagccactcacggacaagaaggcacggatgaccccttgctcagcaatgtgggattagcctctttgggcagggcaatctctctgcccccagtggcttagacagctggctctgagacatagcagaaggtctcacaaatgttaggaaaagggggttgagcattattcctccatgtggaattatttttgtatttatccagaaagtgactcttttttggtctttgaaatcatctgtgatataattagaagatgtcagagcttcaatgtccatgtcactaacctccccactcggtacctgggaagtctgaggtccacagaaggaaatgtcttaatgagggtcacccaacaagttagggcaggagggatgcccccgcccagcctgcctcccataccctgccacctccaaccttgctgtctgtcatcttcctttaccaaggaagggctcctctgaagccatgatgatttggggccctttggcagcagacagcaaactattcatacctttggtttttctaaactggtggagacctgagaccagggttctggcttttccatgaggaccataatatgctcctattcctgctgttcccttcttttctattgcaaggagcatgaaatggagcactcctcttctgggggccatgggaaaggagccattcccagatgccgtgatgcgtgacttcagcaatctggctgaagtgactagaatgggccctgttgttctcggcagagcaggcttgggtcaggcagggcggctgttaagaggacacggccggcattgattctgggagtatcgtttcctccctcccccggcctcccaagcacacctgtgtgggaggtaccaggcagagggcccagtgtgctcctttcagtccccttgcctgtcccacctcactgaactcgcacaaagagcttcactttgaaccgaaaggtcaggggtgaccagacttttcgctaagctggttcaaagggaggagcctgggccgggtgagatagattttggcccttttctcagtgtgggagagtatctgtttgttcctgggcacaactacagtcatattcagaggagaaattgcggagatggcatagaagccgaagctggccaccgccaaagcccgtctaagttctctatgtgtgctacagagggcttgcacaaagacatctctccaagcgacattatagcctgaaaaggaaatctcacatcttttcctttattaagttcctgtctgtaggtttacctagacagattcccatagtaaacttctatatgagtaaaaggaaacaaaaataacggtggcttaaataaaatcgaagtttaataaactagaagtttaattcaggcgggcatggtggctcacgcctgtaatcccaacactttgggatcacttgaggtcaggagtttgagaccaacctggccaacatggtgaaatgctgtccctactaaaaatacaaaaattagccaggtgtggtggtgcatgcctgcaatcccaactactggggaggctgaggcaggagaattgctggaacccaggaggtagaggttgcagtgagccgagctcccgccactacactctagcctggtgacagagcaagactctgtcttaataaaataaaataaaataataaaataaaatagcttaattctgtctcaataaaatgagtccatcatctagggctattttggttctacacagggtcagggcctaagttttctctctgcttgcattggcatcctcagtgcatgcatggctcctactatatggcccaagatagctgctgaaaatccagccatcacatcttctttccagctagcaggaaggagaagggagagaagaaagtctctctgtccttcctttaagggaatttcctggaattcaaacactacacttctgctatattggccagagctgaatttcaaggccacaactaatgcaagggagactgaggaatgtaatctttattctaggtagccatgtgcccagataaaaaccagggattctgttaccgaggaaggagaagaaaatgaatactggggacaattagctatctttgctacatcttcctcctagatagataagagggcttataacatgtgggcatctatatttatgtttccaatattattatccgggactggattagaagcatagactgataatgtaaaggttagaaatcagccagtccacaccctcattttaaaggttagaaaactgagatccagagagattaaacagatcatctgagatcacacagcgagttggtggaatctaattcccagctcatgttcagtgggagtatttttgttctgctctgtttcttaacttaagagaaaagcttcattctggaggggaaggagttttgagtgccaaggatgaaattccacccatcactcggtctctgagctgcaggacacaggcaggacaacggtaggattttcatgccccgatctgcctggccttgagttgtggcagctggggaagccactggtgaggacgctgcactggagtgtgggctggctgagtgtgcccattctgtcactgcctgtcccgtgtctgtgtgtgtgcatgtggctctgtttatctccatgtcggccctgtatactgattccagcctgccaaggctgcatgtctgactctgtgtgcttctctttcagggagcacactgccaggatgggagctgctgggaggcaggacttcctcttcaaggccatgctgaccatcagctggctcactctgacctgcttccctggggccacatccacaggtgagcactgcaaacagatggacctctgtatctcagcatggaaggcacggcccctcactggagcaaggctgcttttgggggagccaggagaaggagccgtgggagtgggtcagggtgcctgggccttggcccgaccttactaaactccttggtccccggcacgtttcgtcctgggcttcagtttcatcatccacaaaatgaaggggttggactagaatcagggattgcaaactcagcgcctacagaagccaggcccctgacacaaatgagtgaagctgaccaggtagcgactgtggtcaactggagaactgagacccttctaaagggaaacactgttctcacttctagccaatcgctactgcgggaaggtggatccccttttgcaggatctgaatttttaagagaagccagaaatctagagctttatgtaaaatctccctagtttgtaaatgttaccaatgaattcaaaatgtaaaaaccactctaataggctgttaaaaaaaaaaacaaaaacaaaaaaacacgtatctgagaaatatctttccaactctgtctggaccacctggtctcaatgctcccttcctgctttggtgtcataagatctgggtacattaaagtacttttcagctgtaatgctctaagccaggtttagatctatttttctatctcagcattgtcagctttttcttcaagtgattttcaattaacatctagaagtgtaaggtaagtttccctgggctacaggaaacactgatcagataatccaaacttgggacagaagacagtgacagacagggacaatttttaaatttcaaatgggggtttagtgctgcaatattatcatcaccattgattgctcttttgttaatgctatttttatgtccattgagtttgatgcttttctataagaataaagaatcttacattgaatttatattttgtttttctcaacccattgatagaagagaataattgataactagtgaaattccttcactgtgattttttgaagaatctttctgatccttaggggacatagcaagtagcattttttttttttttttttttttttttttttgagatagggtctcgctctgttgcctaagctggagtgcagtgatatgatcgtggttcactgcagcctctacctcccgggctcaaaagattctctcatctcagcctccctagtagctgggaccacagatgcacaccactatgcctggctatttttaaaatgttttagtaaagacagtgtcccactatgttgtccaggctagtctcaaactcctaggctcaagggatccttcagcctcggtctcccaaagtgctgggattacaggtgtgagccaccatgcccagccagtagtccttattttaaccctccaggcaataattggctatattacctgaatttattcatttgtctttctttcatttattcaattaacaaacacaaagcgagcattgactctgccaggaactgggtttgggtttatcttttagggtgacttatcctaaaagtgatccaccttggagaggtgccctcaggtacttcccttgattatttcttcccgcatcctggcacctctcttgctgtttgcctatcagctatgtggaaaggggctgagcctctggttccctctggcctgtgcttttctctgatgtcagagggatgtagaagccaacccttgctattcatgctccaagtaggtcgggcttgcactccctctcaatcccgcttctggtggcccctcctgggaaagtgagggtggtttccatggtgatagttcagcgaaagccctggccctcttcagacactttctgattcatacaaatgaaaagccactgacactggccttcaccgagaggaaaatgtccagctccaaaaaaaggagtgtccattcaaggccaatcttgcacctgctgtgctttagctgtggtgtcagagcttctggagagctgggatgtgtgctcacacaggtcagactgaccacctccaaatccagatgcaaagtctatgcaaactcctgcacttggagagtgaaaagaacagtcaggattgtcctggcagatgcggactacgaggctgcaaggctttgcccagtggagttgcaatggctccttcccagcatattcatggctccttgcctggaccactgggatcctcagttggccatatatgttccccgcgtggctgggaattcaccaccttggagcctgacactcttgtccaggacttgatggaaggcagcccagggcctctgactggcctctactggaatccagccaagcacctgaccctgtctggagataaaaccagcagtgggtttcacagcccagccctcatgaccatccttggctgctcagtatcaccgcagagagcccaccccaccactggcgactctgctcttacgttaaaatggaaagtccactgatgagcaagcccacgtcttcccacattttttccttttgttgccactgcttgagccccttgacatttacaatagctggaagagctactttggtgaaactccaaaaaatgtgaaattcttttcttgatgaaagagatccaaagcctgtgctagggctgacagcaaggcagagggagcctagaggagggttgttatggggctggaagcagggatgaggatgagacccagcaagcggacactaagtgcctgcactctgctttgcagagaagagaagggccagtagctgccttccaatgggcaaagaggacaactcagtgtgggtgtggggtctgtatctggtgctgctgagtgcagatgaagggggagcttccttccagttttccttgacatatataaatatgggacagacactcctactctggagatagctgaacaaaaatcaaggcgcatttagaactgacacgctcataattgcactgtattagtctgttttcatgctgctgataaagacatacccgcggctggataatttgtaaagagaaagaggtttaatggactcacagttccacatgactggggaggcctcacaatcatggtagaaggtgaaaggcacatcttacagggcagtggacaagaggaaatgagaacgaagtgaaaggcgattcccctgataaaaccatcagatttcctgagacgtattcaccaccatgagaacactatggagaaaaccacccccatgattcaattatatcccactgggtccctctcacaacacatgggaattgtgagagctacaattcaagatgagatttgggtgaggacacagccaaaccatagcatgcactgaagccagaatccctcccagggtttctttgctcaagagacaccttctttgctcaagagacacagcctctcctaggctcccttctgcagggcctgagctgtgagcttgcttccattccttccagtacctgccccagagtttctcatctgaaaccttgctctgccatgagcttacctgcacgtcaccttcccacctcctcacccccaacccgggttaatttgaaagctactgtttcatacttcgctcccttctggtcacagaaaaaaggagggcactggggcttgttcttggagccagttcattctcatcttgttttgtccattgtctcttcccacctgtttccctctggattttccatgctattgatggagattgttccagtttctgtgacagcgccagtcctcctcactcaagcccacctcaggacactgctgggtcaagccttgttagctatgtgaacattgagactctttcctgtgcttctgcagaggtcagggagaagtgcctctgcaatacccacccccggtctttttaggctcaactaaacattcacactggtgaccacatgtcacactggtcctcagactcctttggaaaatatagaataggaaacacagatgccatcagagcagcatcagcctcctctcttccatgggaatggtcctggcagccttccagacagccatctagaaactattctctttggttctctaggtgacagctcaggtgagaggaaatcagactgtaactggacaagtgtggagaccactgtgtcttagaagcctcatgccccactggagccagtagcaactccgtagatgtaactttcagggttcttgcaaaatgtcccattataagagtcactgcactcagggaagcctacagtgtgacatctccaccacgtatagatataaactatagttcctcccagtttagatgacattcaccaatcaggggtcactttgttataaacaatgttgctacgtaacaatttatataatactatctttctcaggtttccaggggaacagagctagaaaattaacaaaaggtctaattctcatgcagaaagggaaagagcttcattagctattcaaatgttgctttccagaagacagaatgtcctggaatctgagtagtctaggtaaatcattgcataacttcagagcttggaatgtcctgagaagccatctggtctacgctttatttattaaatggggaaactgaacccagaaaagggaagtgacttattcacagatatgtgatgaattcatgcaaaatatatgactggtccccatggttcctgcctcctatgtcaggaggtctctcagctctctaaggtcttgcttttagctctaacagagaggaggtaggggccttaaagatgcatgggagcccccttttggcctgtagcattcttgcttggtgaggctggtagatgggagcagtgacatctctctgtccttggcagtggctgctgggtgccctgaccagagccctgagttgcaaccctggaaccctggccatgaccaagaccaccatgtgcatatcggccagggcaagacactgctgctcacctcttctgccacggtctattccatccacatctcagagggaggtaagccaatctctctctgctgctccctcttccctccactgccccagagcttagcagataggatgcaggttgccatgagctcagatggacagaataaacatcacatgctttgggttcatgttggcatttggttgtctgagataaccatcagctctgagctgttaggaatggcttgtcggaggtccaatcttagtgaaaggagcacttatcgagaaaactccttattggtgtcttgagtaattctgtttatcttacttttagaggcctggtcattgaatgcagtacatgcagtgatggcatttgaccagacaggcattatttacacattgcaaagcagagagcatagaaaagtaattacagccagccatctatatctgtgggttctgctcgtgaattcaaccaattcgaggttgaaaatattccaaataatttgcacctgtaccgaacatgtacagatttttccttgtcattatttccttaaaatacagtttgacaactatttatacagtatttacattgaactaggtattataagcaatctagagatgatttcaagtatatgggaggatgtgcataggttagatgcaaatatgcaaatactatgccatttaatcagcgactggagcatccatggagtttggtatctgggaggtgctggaaccaattcccttcagatactgagggatgactttacttgtaagtacaccaagcataggaatgtttggaagatgtgcctttttgcctgccccggtgagatggggagtgcttagggagtctgcccttggctctgatataaccttacccttaacactgtgttattaaacctccccccaatgctacctcttcaggcaagctggtcattaaagaccacgacgagccgattgttttgcgaacccggcacatcctgattgacaacggaggagagctgcatgctgggagtgccctctgccctttccagggcaatttcaccatcattttgtatggaaggtgcgtagaccactcctacagatcaaatgctacccatggatctgacaagagggagactttccaagacagagagagaggcaagagggcaagcttgcctgtaagataggaatcattctgtcctgccagatggggatcatgaacaagacagacatggtgatttgggagagctgaagtccataaggcttgttatttatagtggcctggatgctgtacttgttttagagacgggcctgccagcctttcagccaccttccaatcatgtcatgttcagggaggctctgcaagtgtttatataataggctacgatggacaagatacaggaaaattccatgtggtacttgcccctggctgtgttccctctttaaacaattgagagtgctaagaagtgagagtcaggaatgcacaaggatatgcagcgcatgtccaggtgattccacatctgatatggacaaaaatacaaaacacttagaactgaatggaaaacatgccaacttgtgaactaataattggcacgtctgcttggccctgagggctttattttggtctggcttaggaagattgggttgctaatgtttttgttgttattgttgttgttgttttgagatggaatcttgctctgtggcccaggctggagtgcagtggcatgagctcagttcaccacaacctctgcctcctggtttaagcaattctggtgcctcagcttcccaaatagctgaaactacaggcatgttccaccacgcctggctgattcttgtatctttagtagagatggagtttcaccacgttggccaggctggtcttgaactcctgacctcaagtgatctgcctgtctcggcctctcaaagtgctgggattacaggcatgagccacaagcccagccgctagtgttatttttactgacctcaggtgataaaagtgtgactggctctatggtggccgtggtggggggtcagggagctgagctgtgactcctaggttccctctgggttcagtatccagtaaagagatgtgtcagccaactctggggagctgttttctcttgcagggctgatgaaggtattcagccggatccttactatggtctgaagtacattggggttggtaaaggaggcgctcttgagttgcatggacagaaaaagctctcctggacatttctgaacaagacccttcacccaggtggcatggcagaaggaggctatttttttgaaaggagctggggccaccgtggagttattgttcatgtcatcgaccccaaatcaggcacagtcatccattctgaccggtaaggtttgccttcacttaaacgtatactcattcattcaaagtacacttattgagtgtgctccctggccaggtgccgctctaggtgctgggagaacagcagtgaatgaaacagatgggaatccctgccttcaaggagttctgtccttccccaggcattggcctaatgatgctgaattgaagaggagcaagcatgcacacatatgtacatacaacgtagtttcagattgtgataattggtagtaagggggaaaaaagacagagtgagatgctagagtgtaactagggaagaccactttggatagggtggtcagggaaaggcagtgtaaggatgcaacatttgagctgagaaatgaagggtgaggatatgtcagggaaagagtgttcaagacagacagcaagtgcagaaggccggaggtatgaaagggcatgacattctcaaacgatggaaaggccaccagagttgtgggagcacagcgagtggcggaagagcagcatgcaatcacatgggagttacaaatgggggcgggacaggacctcggaggctgcggtaaggacgtgggttttcttctaagtgggatgcaaagtcactgaaagtctttaagaagagcatgatctgatttaaaagtaccttctggctgtagagaatggttttaattgtgaggcaaaagcaaagatggtgcagggggttaggaagcttctgctgtggtctaggcaagacatggcagtgatgaggacccagaaggaacggcggctagtggatgtacctgagagatgtttggaaggcagcatgggcaggtgtaagctggcagatgctgccaaggctggacctgccctgcagtcccaggagctctcatcctggccctttagagggaaggacagaggtggggtagacaaacagagacagagctaccctggggctgctggggaagggagacaggcattcctcaagaacagggcccgagctgtgggtgtcaccatgaaggcagcaggagccagctacggtcaggggcagggtgggcaggagctgaagtgcttgctggtgctcacagacacccaaccttgccggtaaacattagtacctataacagtcactggactttctccccgtaaaacactgttcatcactttacctgtcaaatatacttcaatcttcatcaaaattctgtgaggcaagttctgttattatctaccttgtagagatgaaagcactgaggctcacagggctaaatttactcagtcacaaggttggaaagtgttggagatgggattcaaacccaggtgtgcctgtatcgcctccacggataacggctgacaccttgattgacacaaagtatgtcagggagcccctgccttcacactagagaggatgtcctcttcaattgtgtgctgatctttttggtgctgtttcttaagtacaacagtgttacttgaagagatccaacttaaagtttatttactgacctgttagtgagaagtgatctggacagatgctgtagagatggcaaggacagaatgtctgcttgttccgaatatcttttgcttaaagtatatgttggagatctcaataatctgatagatgaatgtgtatgagtaaagataataagcgcatgcacacacatacacacacacacacacacacacacatacacacacacaagtaaatgcaggcaaaagtcatctgagaaggttacttagagaagcaggaacttaggtcagcttttgaaaggtagtaggtgcttgatcaggtacagaaaaggtgggaaggaatgatgaagacaggagtgggcgggtgaggtggtcactgggcactgagaagcactaggcttgcagcaggagcttcctggggagggtcagtggagggtgcgaggttaggtggggctggaccagattgtgccaacagttggaaacaagtgtgaggacccaggagcagctatccagctaccaccggtaccaacattgtttttcttttccaaaaacctccttagattactttcccagattcattttagaactattttccttaagttccaagacatactctttaggaatttctactgtaattgcataaaatctttatccttacatggggaagagttggaatcattacaaaattgtgtctttgctttgtaaattattctcaccaggggtatagattttgtgtgtgtgatttgtatttcatggatattttacgtgtatgagggcaggttatcagtcaatttggagattattagttcttgctattataagagatctgctgtctaacattgcaaaatactggatagtacacttaaaattttaagagggtagatctcaaggtaagtgttcttaccacaataaagtaaaataatttttaaaaaataaacaggagaaaatagcaatgcaacaacatttacaatactcaaatgttatatgactgctactgtgtgaatcagagattacattttaatgattctaagatgcattatcataagaatcattaacaggtcaataaataaactttaagttggatctctgcaagtaactctgtgcaagctgctctaggggtgggagaagggatttgggatagtctccatgtcatttccaagaattctgggattggtgttttactcggatcagagatataaattcctaatgccctagctatctgaactatctcctaaagtcaggctcttccaagaggcatgatcctctgcctccaggatgaaaggggaacatcaaaaggcctagacctcaagtatgtgacccactcaacatcctggagcttgaagtcttcactgctgcaatcatttctttggcattttactcagcgaatgaacattatggtcaagtcaaaacccttcttcttggatatcactgtatggtatgcaaaataatgaaacttgtttgctctttaaagaaaaggcttccttctttaagaatcacagccctgggatcatcggatagcatgttagctgtcgcagcacaggcatgtgcttagagctctttgttttggctgcggtcaagactattcagatctcttctctctgccctttttaggtttgacacctatagatccaagaaagagagtgaacgtctggtccagtatttgaacgcggtgcccgatggcaggatcctttctgttgcagtgaatgatgaaggttctcgaaatctggatgacatggccaggaaggcgatgaccaaattgggaagcaaacacttcctgcaccttggatttaggtactgcccctcacttcggcttccactgggctctggaacattgaagccactctatcccactgagaatttacctttcccatctcctctccccacagccgtaccatcctaaatgacctagtggatgcaggcatttgcatttgacatctgagtttggcatatttgggaattgttcttaaagaatgcttgttttttcttacaagcatagttcactcaaaacaaacaaaagctcgctgtttatatgaactcattcattcagtcggccacttacaaaatattaagtgagcatctactgtgtgtaagagccatgcctccaatgcacagctaatattcattttctctttctttggtaaagaggtcatgtcatggcttggggtttttcagagattatgtgaagtgtctctgctgaggcaaatgaccaaggagaagcaaccctttgacatgatctaatatgtgttttgtttgccttggagtgcagcatcatgcctgacattggcatgcacacacattgacactaagaggaagctgtttgccccacagtaaacaatgccttttttaaaaatttaatttaatttaaagttccaggatacatatgcaggacgtgcttgtttgttacctaggtaaacgtgtgccgcgatggtttgctgcacctatcaacctatcaccccggtattaagcccagcatccactagctatttgtcctgatcctctccctccctctgcccctcgcccctgccaagccccagtgtgtgttgttcccctccctgtgtccatggtaagcacacctttttatcatgttgaatcaaatctcagctcagtggaaagttgaggttatctgtcccatggctgtttagagattacgatgctcctcccttcagcttcccacatctgggagcaagatcagagggaagccagagacttttctgggcttggagcaaagcaattttgctggctgggcagaaattccctgggcaagggaggggtgctccaggttccagagtgcattttccgacagcccagagactacttcttctggacgggaaactcaagcaggaaacttaagcagccaaagatgacaatgacaccttggcattgcaagcctcctttgttagcaaacactaagtgcacttccattctgttgttttataaaccaaaaggccagtttattaatttacagtgagagttagaaacaccaggaaactgactatttacggcctcagcagaagaagaaagtggctaagggcccaagatctggcatccagtggcctgagtttgagtctgggttgcaccttccaggaggtgtgactgcaggcaagtgactcattctctttgcctggtcctgcatctgtaaaatgggatatacgaggagctatctcaaaggactataggacaattaaatgtgataatatgaacaaaatatttgtcatcatgtctggcacagaataagcactccataaatgttagcaactattttctccttataagcaagagccactggaaaggtgggcactcgccgtcttttgccagggctgttcacatgggcaaaggagatacataggtgggaattacacgtccacacctcatttgtatagagacattctttgagtgataaacttgaagcatctaaaatcagtaggagaactgagacttggacccttcatttgttcacccattcaggaaatgaacacatactggtgggaggtactcggttagaccaggtgtcctgaactcttgggggaaggcaggtatgaatggaaattggtgacggggcatgagagagcaagagagtgggcaagtgtagtttagtgcagacgaacacatgaggatgaggccaagctggttcccatagagagatcagcagcttcggaggcccaggggcaaaagcatgcctctcccaaagaaggtggggatggcgaggcagtggcagtatatgagagaggcaaggggtgagaggtgaggctggaggggggcgggggcaaaggaccttcgaatctgtgccaaggagcttggattttatccaaagggcaatggggagctactgaaggatttaagcaggaaagtggacagttaaatccccaacctcagttaaacaccgttcaatagtgattcattttccaagacaagagatcaaaacaagaataatgagagctattcagcaccaaaatcgattgatagcttatagtaagagagggctactgtagggggggaaaatctctttccttctactcttctaagttcttgactggagcacctgcaacaaatcactgattaacaggagaaaagcacacaaatgtatttcagatagtaagttttaaacgacatgggagccttcataaggaaacgaggacccaaatacacagttaaacctgagtgtctgtacacgaggtttgatgaagtggagagctgtgggaaaatgtggtaggacaaggggcttgagttaaacacagtaaacaggggaaatttagcaaggtctctgttccttcagattcctcttggcttccttctgtgtttggggataaggatgctctttttctcagaataaggaaggccctctcacataagggtcttagacctgcttcaggggaaagtcagaaactccttcctgccatttcacaaattccttgagcttgaaatattcaatatgccaagttgccattttggggggtagcgtctcctgaacttcattactgcattaggcattacgcaaaatgcctaaaacaaaatggggtaagaaaaccttgctgccctaaagcagcacgtgctttcatggaggaatgatggatgtacaatttttcaaaaccttaagcctttttttgcttccctccccattaagaagaagagagatttctctcctttccacggcccaaggcagatggctagggcagtcagtcatgttagcctctggtattttcctcgagctcaactctaggggagctgagcatgagagaaataacctttctctcttggaacatgttttcctgaaggtatccaagcatttgcttcaggacataattgagcctggcgggtggtatagtaggtctgttggcttgtttgtttatttgtgattcatgctcccatcttctgccagaatggagctgaagaggctcacagggagcaaacatcaggcaggccagggagcgagaaagcccagaggagtgcttgcaaagaaaggtgcttcttctggagaagagaagcccagcaagtgaatgaatttcccccaaacagcagggagggaccctccttcacctgacgctgcttcaactctgccccatccccccacactctgtgcaggtacagactcgtgcagaactttactttttgttatgtttttctttttttcagacacccttggagttttctaactgtgaaaggaaatccatcatcttcagtggaagaccatattgaatatcatggtaatacatagctggctggaggcctgattccctccagtgtctctctgatcaagaggtgcagggcttttctgaacatctcacttttctcagagcatggcttcccagctcccaatgtctagatgagtgagcagccgcttaactggccaccttacatggaagtggcaaaggccaatgctggccaaaggcccatcacttgcagtaatatttcccttttcatggaaatcttcactgacttaatcaaaaacctagaattggcatagaaaagataagaactgagatagagccagcaggggtggtattttaagagctaaaacgaggctgggtgtggtggctcacgcttgtaatcccagcattttgggaggccgaggcgggtggatcacttgaggtcaggagttcgaaaccaccctggccaatatggtaaaaccgtgtctctactaaaattacaaaaaaaaaaagaattagccaggcatggtggtgggcacctgtagtcccagctacttgggaggagattgcaccactgcactccagcctgagcaacagagaccccgtctcaaaaaaatttaaaaaaaaagagctaaagcgacactttagatgggccttcaggacacagtagtagcctcctttgcccagcaaaggctgcgggaagcgctgcagttctaatgccaaggaggaattcagaccgtgagacatgctagagctctgcaatctgaatttgttgggaggctggaactaaactttcaaaactgaaacaaaagaatggatgatcatctcttcccaagtgaatgaatgtcctaattttcttttatttacttaaaaaatatttttaaagaaatgagtcaatgcccatgtgcgtaggggggtttccttgccttggagtcacaactttttgaatttgggggtctgtccagctcctaaagggtctcgtttctctgacaggacatcgaggctctgctgctgcccgggtattcaaattgttccagacagagcatggcgaatatttcaatgtttctttgtccagtgagtgggttcaaggtgaggagtttcagacaatttggtgacacctaacagtgggatagaagaccagaaatcactgtctttgcagaactaggatttatctcttataccagtaggaccactttaatttttgcagaatcaactaaaaatgtgcaaccaaaagttgtctttaattagacaagccactttagcccatagcccagaaggatgttctcctctggctaagatttcaatttcacctcagtcagggtctgcggcattcagcttagttcacggaatatctttgatgtggcaggcaatggcactgaacaggaaatgcagataggaatagaacctgccctccaaatagcccacatgcagggattgcagaaagcagcaatcctagttgcagtccttggataacgggtttacagatggattttctttcttttctctttaatttgcttttgcaataacaaagaatataaattgcttttataaaagtaagaaactcattaagagaaactcattttttaattaaaacatgggagcataggcagattgattagagccatccatgccccagcctggtgcaaccatggacagataatattcagttcccatggtgctgaggatgcttggagacaacactgagtgtgacttgccctcacagacaacctcctgtctgactgtgctgtttgctttctgcctagacgtggagtggacggagtggttcgatcatgataaagtatctcagactaaaggtggggagaaaatttcagacctctggaaagctcacccaggaaaaatatgcaatcgtcccattgatatacaggtaccaaactcacagcaaaaatagaaaatagaaatgtgttgttttgaagaagactctatagatcacagacattcttgtcacttgggtgctgtgattctcgttgccctcctgtgaggtaggtcagccaaagagtaccattcccactttagagactgaagcagaggcttactatctgcccaaaagccagggctcagattctctcctgggtccagcttctgagttccttctctttaacttgcttcttcagccatgactgagtgtgcccccaccacagggatgggtttggactccccagcctcacttccccgtcaatttccttagggaccttgagtgcacaggatgcagctaggatttggggtgcaggccaggccagcccagatggagaacacacgcatggccttgttctcaattgagctaaatcaaagccagcattcatagaatggacagtgtttgctcaaaatcttcacttagagttaattccatctgaaggggaccttgatgttctcagttggctccatcaagaaagtgttgagtaaatatacaggcctcaccagctgagccagtgggatactaggctttgggaacaacaggagagacaggagaaataggcaaagtaaatgagatttatctccttatgcccagtctcattccaagacaagatttgaggctgcttaaatgcttgatagagaattagaagtcatttgagctgggctcagtggatcatgcctgtaatcccagcactttgggaggccaaggtgggcagatcacttgaggtcaggagttagagaccagcctggccagtatggtgaaaccccctctcgactaaaaatacaaaaaaaaaaaaaaaattagcttggtgtggtggcgggtgcctgtagtcccagctactcagggtctgaggcaggagaattgcgtaaacaggaggtggaggttgtggtgagctgagatcgcaccactgtactccagcctgggtgaccgagcaagactctgactcaaaaaaaaaaacaaaaaaaaaccaggcatttgagaaaggccatctccacccattttatcctccttcagccaataaaaatagctaccccatttgtacaacactttttcctagaatatcaaagctcgggtcccaggtcagctcgagtcccaggccatctgtctgtgctttcaccccgccacaccatcctgggcagaacttctaccctctgtcttgccttgtaagaaggaccacttatccaagggaggagcctctgttctgcacttagcaaagtctgaggaaaactttctcattatttggctgagactcttcccttcacatggcttcagtgttattgagaaggatttacccagattaagtttcaagttgcagattctccttgggtccaacagaatcaaaaagcactgatcccccacagcacattctttccagatttaattttaattttctctcataaccttgaatgttccagctttaattctgaaatagccataatcttatccctccagttcacttgaccacaggaagtctagctctttaccaacctcccctctccaaatacttctggaaatgctcaaggaatgcttacatggtctacaaatctttcctggtgtttgctctgccagttttctggctccagacactgttgattggaagaccacctctcagtgccaggaaaacagcattccttagacattccccactcttgcatttactttgctcccagcacagacacaggcccttcctagagtgtcccaaaacacaattaaacccaggctgagagctccataagccaagaccttcatagggacccaaccctacactctataactgttagtctgttgccatattgcaagacctagttttcttctaacaaaaagagttcccttggcaatacattccccaaattcaagttctccattatttgaggttcagagaacagaagattcaacagcagtgtggtccccttactcagaagcttagggaagtcttcccacaatgaaagcattcagaactcccaattccataataagacctttggctttttcttggcaaaaccaaggtctattgagatggtcatctaaaagataagagtcatgtgcctccaagggtgaattcaaacctccatctctaccgaagagaaggtgttgccacgctggagagatcaggcttactcctaattctcgccaccaatctttaatcaatggtcatctccagacttagctagagcatctcttcatgctcatcaaaggtaaaaatggtgatgtagaatatgctcctggatgtttccaaggccagaaaaacaaagccagtctttcctatgctcacaagaggtgagagaagcaggatttccccatttttagcaggtgacaaatgcatcagccaaaagttaaatgtcctagttaattaacccagggagagactaaaatgaaacacaactccccacatgctcatttttgccactattgcaaaaatgcagtttttctctggtcacctggtgcctctcacctccccgggccctgagcttttacgtgctcctcttcctgcttgtgcctgcccccagtgcccaactccgtgtcatacacagtgggtcccggcatacctgccatgcactgacatagccagatcctctgggccagggagtgtcaaggacatttgcaacctaggcaagattggaggaggcaggttgggaagaaagaggaagcagcaagactgcacagttgaccttaagaaaagcttttccaagatctgatattttgtgattctgaaaaaaattataataacaaaaacacactgtttctatgtcttgcccttcgttcagctctccttggctgaaaaatcctcttgcctcccaccttctctcttaaaacccagccacccttcaaggccagtgggatctactggactgagatttccttggggacatcaggcagtctgtgtgttccccacagcagctggtgcagtggctagaggtcggcctgatggtaacaaaaacatattctgaagccagagagatcacagctctaccacttgtgagctttggcatatcagcaagtgaggtgcccacggtgcaaaatttaaggcagcccgctccctccagcgccaactctgcacttgcatgaccctaagagtgggtgctgccttaaattttgtgccctgggtacctcactcacagtcttgttacttagtgtctcgtttcctcacagcaaaaatagggataataattatttcctcatgggcatgttttgtggattcagtgcaatgaagtgtgcagactgaaaagtggcccatacattttttattatttaaaattaatttattggctggactggtggcccacgccggtaatcccagcactttgggaggccaaagtgggtggatcaattgaagttaggagttcgagaccagcctggccaagctgatgaaaccctatctctactaaaaatacaaaaattagctgggtgtggtggcgggcacctgtaatcccagctactcgggaggctgaggcagaagaatcgcttgaacaggtggaggttgcagtgagctgaggtggcgccattgtactccagcctgggcaagagagtgaggctctgtctcaaaataaataaataaatgaaatgaaatgaaatgaaataaaataaaataaatttactattagttattatattgataattattttgttaatacttattattaccaagaataataataaactcaagtctacttaaagatctctttctctgaatgatgatggattccttttactcttcttatccaaaactgaggtcatttttcaggttagaaaaaaggaaaaaaagaaaaaacagcagaattgagtagatgttctcctggaattattgttggatgttatacctggaaaaaatctccagcccccttcgataatgttttcaggctcagttctcaatcttacggggtctccaattgaagaacatgctaccctcaggggaaaacttcaggaggcccgaggagctgggcttaccttaactgaccttgagcttacatctgaacccctctgagcatcagcgttgacctccgtctaaaagcaagtttgcaacccctgcctctctggctgctgcagagaccacctgagatagggggtgtgagtgtgtttttgcaggaaatgactgagttttaattgtggctgaactcacatccacatggctcttcttccaagccaaagataacggagctgctgggtttaaaacaatgtttcctaaaaagtctcctctttttttttttttttgactggctatactttccttccttattaccccagtctggtccctttggtctctatgccaaagatgacagcagctgcagcccttgctctaaattgcatgtctttgaatgatagtcatggtcaggatgcagacacaccctggctctgggatgggccccagctggcagggatcatgccctccctggaggcctgctccctaaattctccacctggccttgtagctgctcaccagccagccctcatccactgagacctcactctgtgccaggccctgggctgaatgctggggacaagggggcaaaaaccagctccttgcccacccagagcccaccatgcggtgggaggaggcagacatttgaacaaaagacattaggcggcttccaccttagggcaagagtggatggggcttagaagtgttgtgatgtagttacataagtctgggttcaagttttagctctgccacctactggctttgtgatcctgggtaagtaactgaacctctctgaggatgagtttccttatctgtaaaactaacagcagcctcatagttttgctatgaagatgaaatgagataatataggtaaacatctagctttagtggttctcaaactttcttgcccattagaatcacctggacaacttttcaaagtccagatgtccatgctgcaccccagacacaatcaaatctgaggctccgaggatggggactgggcatgagtattttttaaagactcctccccatgggatgcagaaccatgtttggactgttggccgctgttcatggtgctggtagtggtggtgcaaattgtaaaaagtggccagcccagatcctagaagagtggctacttattgtaaatgctccgtaaaatgttcacccagccataagcagtagatcactggtttcgatactgagtactgtaggacctcaggccaggcatttatctattccaagactttaggctgtctttctcataacaaaactgatgggggcaatcattgggataatcatctcgggccgttgtaaatagtgttgcagcagggacaattttagacttctgagtatatgtttagaacattaatcagcaccttccttctctataaaaaaaaaacgactttgctctgtaatttctgtgtcattcccaggccactacaatggatggagttaacctcagcaccgaggttgtctacaaaaaaggccaggattataggtttgcttgctacgaccggggcagagcctgccggagctaccgtgtacggttcctctgtgggaagcctggtaagcagccccttgtcggggacacagatgcaactatggctcggttccttgaactggcagctatgcaggcaacttccagacctctcagtgagacagtgctcccaaaggagagcacttttgtgacacgggagcagtgggaggatccttggagttggcaggagacagcagaaccccaccctgcccataagcctttcaggaaggggaagggcctggtccaaggcagtcaaggtacaaatggacagagctgccctcccctgcagagatgtgcagttctttgcctctttgggtgctattattttaaatccagtacctaaggtgcttgttagaagagattggaaatggtcgggttgttctcggaggcacttggccatctccagaaggcagtcattaggaatgaaagtttagggggagaagtttatggctaccgaaaataatagttgagaggaactatatttgttttacatcttgagcaaagtgggtggggtgaggcagccacatttaactccagctaagaagttagtggaaaattcccccgcccagagctaatgaatggctcttttctggtagggtttttgttgacttcaaaaacctttaccaagagtgggatggagcaagccagtgatctgggttttggataggcaaacctggcatttagttatttagggaggggaagggaaaaaagaggtagccaaaagtttgccaagagcaaagggctctatctcagtctttcctgttttgggttacagtgaggcccaaactcacagtcaccattgacaccaatgtgaacagcaccattctgaacttggaggataatgtacagtcatggaaacctggagataccctggtcattgccagtactgattactccatgtaccaggcagaagagttccaggtgcttccctgcagatcctgcgcccccaaccaggtcaaagtggcaggtaggacttttactaatcccttcctagactggatgaatctgaaaattgttaggcttaaagtaaactgaagttacaacaaatctgtatcagtcagctatggctgtaataatgctgcataacaaaaaaaatcttaaaacttcatgacaggtctttatttcttactcatgtatctgcaggttgtctagggatcagcttctctagactgagcctgactccaggctgagagttgggttcaagtcacttccatatgactcccattcttcccaaaacatattcttctcacgggggagattgcaaactcctagtggtgagcagaaacacagaactcttaaggcctaggctcaaagatggcacattctcacacattccattggctaaagtaagtcacatggtaaagcacaacacaaataggctagggaagcatatgtctgtcaccaagtttgagggggaggaagtgaatatttgttagacagttattcaatctactacaaaatttttaatctcttgtatctgtgagtttggggtttttctttttcttctcctaaatcttgatttagatgtcctgtaatttatgttattggaggttactggaatcacagattgttgaaggtaaaaagagacttcaaatataatccaggtcaattattcttagtagggggagttatgtatcaattagagttctttggctgttagcaacagaatccaacttgactatcttaagcaaaacaggaatttattgagaggctattcaacttggagaactaaaggataagctgaataactaacctccaaaaggacagggaacagggtagcttctgggatctgggtagcaggaactaatggactgtatccttaaggcatcatctttaagaaccatgcttaggccatgggacatagtgctcaaaagtcaccttccagggagagagcatctgcttgggctggtggcttgtgtgctcaccctttggctaggaaaggcaggaacagtcattgaaagttcttctaagactgcattaaatggataaatggctgttccgcaaaggaaaattgggatatattaccagaagaaaggggaatcagaacttaagaggtgttaaacgtatcacatgctacaggaccataccacctggaggagtattagaatatggggttgggagaaagaccatggattgagaaagcgtatccaatatactcaccatatctattattttggaaagaaacccacagaacataaaattcaacacaatctttttggctgcctgagatgtgcttgtggaagaatctgtggaggcaaagtttaaaaaatctgagaacactgatggaattcagtccccttatcttaacactcatgggggaggcggacctagaggtcatgtggtggaggcagtccacaaacaatgcagctgtgatgtcagggtgcccaccttacacctcagaccctgaaaaagaaggcttacgtgttttggagggagatggtaatttggtgagtgtagctaaagagagggaaagaagcagcagcttgtgggtagaggccaagatgactagacatttgttccttgacaaagtaacagagtctgcttttttaattgacaatgtttgaacccctacattatttgcaaaaggtttcagggtatcttaccataaacacaagtccaagtaaatctggcaatgagggtaaaaaagatggaaggagaataaattcagcaaaagcagagggggaggtgaccgagattagcagaagagcagaagatactaaaatagacaataaactttatctctaagctacctggaagccagagcaaagaaagaaacctcacaaattacttaactatcattatccactgaaaggaaggcaacaaggagcccagaagaccaagagggacaactttctcagctgtgagccactgaggaattttccacaggggttttcatatgaaagatattcacaacaatgtgagcagcaatgctgggagcagttttatgcaaagatgctctgtgtggggctatttgcagtttgactcctaatagtagatggggacatgctgttggtcacattctatgaagacgttttgaagaagacatttttggtttgggttttgtttggcagaggcagaatagaataaagaacatgggctttggaacaagacacctggaatttgggttccaggaatgccagttatttgctgtatgaccttagacaattacgtaatctttctttatgtcagcttcctcatctgtaaatggagataatgattgtggctatttcatgggattgttgtgaggattaaaggagtttgtatatgtgaggcacttacaatattgcctagcacacagtaagtgcttaatgaatgttagctcttattattaccattaggtgcaataatttagcagctatgcttaaagatgggaaaggaggaaggggtgtggctaacagcaatttataccaattctgctcctttgggacatgcaggtagagggtgttgtagtgagagggaaacaaactatttctatcattattattattgttattgctttatagagacagagcctcactatgttgcccaggctgttcttgaaatcctgggcttaagcgatcctccctcctcagccctcccaaagtgccaggattacaagcataagccaccacacccggctatcatcattattaatgaacataggtctgtcataggcctgcagctatttctctgcatgtctccagtgcctcaaggtgtggatgccatctctgtcagtgtgcatgttgcacacttcccccacccttaggctgggcaggtggccttgccccacctttcctccacagggaggtgggcaggagcatttcatcatgtattcaacaagccattagaaagcacatacaggccgggcgcggtggctcacgtctgtaattccaggactttgggatgctgaggcagatggatcacaaggtcaagagttcgagaccagcctggccaacatgatgaaaccccgtctctactaaaaatacaaaaattagccgggtgtagtggcgcgtgcctgtaatcccagctactcaggaggctgaggcaggagaatcacttgaacctgggaggcggaggttgcagtgagccaagatcatgccactgcactccagcctgggtgacagagtaatactctgtctcaaaaaaaaaaaaaaaagaaagaaagagagaaagaaaacacatacaatgtgccaggcaatgtgccaggcttgtatatgccatggtgagcaagatagatgcattccctgtcctcagggagcctgcagtccagcagtgaagatagatatccaccaaagtattgttccaatcaaaatagaattccaatatagaatgatgacaactgctatcaaagtggaatatgggaggtgctgggagtatagaaaagggagatttggcaaagacagatgggcatgtgagtcttcccagaggaatgagtgactgagctgagacagaatagaagctacctagggagaagtactgccacaggggaacataaagttgaggggtgcatgaggcgttccagctaccaagaggccggagtagctgaagtagagaatgggagggctgcatggggctcgagagagagggaggggccatggtgcagttaagggctttattctgagtgcacagggaagtcattgaagggcagaagcctactggatatcccctggcagggaaagaccgtctagatttgtgtttataggagggagccaagaaaagcaagttcctaatgattgttaaacccttgggtcttcactgaatgactatgtgtcacccagggacaattgtgaagaagcctctgggaggtcagatgtccccctggactcttggcaggagtggcattcagaccatctgagctgatgtcactgctcactataagatgatccatgggcctggggtagcatttggactatttaggagggtgaaagcctgaccgtgagcccttgcctgcatggaggtgggagggcatgccagggagaggtgctcggggtttcttgagaccagtccccatctgcaccccagggtgggtcaccccaaggcctgcacgggagttctcactttgagcaggtcctgacaaggcagctgtggtgccgagggtggccctgagaatggagaaccttgtgtgcgtcagagcatttctgcctcagcctacagtggggttggggtgtccatgcaggagagctgctcttcttgatcacgtttgactgcctgggtcagctgcttctggaggtccctgaaggctggacagaatgcaggggggcagctccaggccccgagtaccaagcgggagaggataagtggagaagatcctgcgcccacctcaacgccctccactttccttggggttagcactgcctgtgcttgtttccgcgttagccccaccccagcctacctccctccctgaaggacattcggctcggagcagccacctcctttgccctgccgaggagctgtgaggcccccatgaaaacagcagcccctggtgaacagcaccagaaaagccccaggtaggggtgtgtgtgtgtgtgtgtgtgtgtgtgtgtgtgtgtgtgtgtgtgtgtgtgtgtgtgtgtgtgtctgtgtgtgtgtctgtgtgtgtgtgtgtattttgtgtgtgtattttgtgtctgtctgttctggagaggctcacattcctcctattcatccccaagcccattctctggctctccatctccctgttgacaggatcaaggattccacctgcttctcccttttctgtgagccccacccacccacctagggacacagctatctcttaggcttctcttccccaggctggctgcagacacggacacgatctccctgggtccttcttcctcattgctcccagatttcattctacaggactgtttgcatttcccttaaggcctttctgatgggaaacagatgggggtaacatagtaatgaaaatgcatgaatcatctaaaaaaaaatttcaaaattttgtcaaccacagtatgattaccaacacctcacagtgtggcagttggaactcccctcccttgattttccaccctgttgtctttaccacctccccactttgcccataaacaccccccacatctttaaagaatgccactattagctagaattaacatgaatttcgttttctgtgatattccaagtacttcacataaaccatcttgttcactcttcacaacaacctaatacagtaggggctactgttttcttcatgacacaaatgaggaaactgaggctcatggaaattaaatatctagacatttaatttccaatatggtggccacgagccacatgtggctacttaagtctaaattggattacattacgttaaaaattctattcctggccaggcgtggtggcttacgcttgtaatcccaacactttgggaggctgaggtgggtggatcacctgaggtcaggagttcgagaccagcctggccaacatagtgaaaccccgtctctactaaaaatacaaaaattaaccgggtgtggtggcaggcacctgtaatcccagctactcgggaggctgcagcaggagaatcgcttgaaccttggaggtggaggttgcagtgagccgagatcgcaccattgcactccagcctgggggacaagagtgagactttgtctcaaaaaaaaaaaaaaaattgattcctcagtcacagcagccaggtttcgtgtgtccagtagccaccggtgactagtggctaccatactggacaacgcagaatagagcatttccttcatcacaggaagttctagtgggcggcactgatgtaggtcaagcaagtcaacagctgagccaggatttcaactcagcttcattctccctcagtgaaggcccttgttcccaaagtctccacctgaagatgactgtgaggaacctgggtttaagtttgctttctggggccctccagcttaagtccctctgggcttgtcctcatacccgatctgagaaggtcaggccccatctccctctccaccagactcactgagtcctgctaggtctgagctacatgtgcacactctggctccctccattggaaggtctttgatgttttttcttctcttgaccctggggtacctagcaccctgtgtactctctagagagggatctgggggttgtggaagcaggacacctgcagagtaaagactagggaagggtgacatctgcagccctgtgtagggcaactgtgcagagcccctctgcttcccaggcctcctccccgctcacccaggtgctcatggctcttctggattatttgagacaaggctagtttggccacatctgcttttccctggttgggcttcacgtatcagtactttgaggaggaagggaggagtggatgctggtgggagaattctgaggcaggatggggtgcgggggagtcaggcacacactgtccctcatctctcggatagcagcctgggagtggccagtgaaggcggcagcaggacagataaggtggctgccgcagctaacagccatggccaggtcttgtaaaaggttctgataggaagctctgcagccgggaagacggctgtgggactgaaatattcttgcagctctcaatctgacttatatttccttggctgacgggagtctgataaacacagtgcctccacctacctgacagtcactcctacaccctgcccaacttctcctacggaacaaagaaagatgccaaatttgctatctaccaactcccattattataggtgtgaagccagtggtgggagccttggggatggtgctagtgacagctgcaggtgtcatttctgttacactagcctcctaccatatgccaggggcttaatttctaagcacagcccatggattaactcatttaacaatcacagccaacttttgaggtatgtgctattattatctccattttatagatgaagagcctgaggttccaggagcttaaatatgctcagggactcacagctgtgagctgagttggaatctgaccctcacagcctggctccagagtcacaatcctccccatcacattatcttacctctgcagccacgttcaagaccagatccctgaggaaggtcctctggccacctacaagagcagaagcctctagtcagtgtccttcctggacaccatattttaaggtggatgctggcaagttgagagaagcacccagagcaccaggatgcacgtgctgtaagggatggttggaagacgaaggatgaatgtcctggaggcggggaggctcggcctggtttcctggctctgctgagcactgcaggaactcccagaaggaaagactaacattgagtgtggtcagggaggacatcactgagaaggaggaactggagctaagtgggacaaagtggagaaagcttgctgcaggtagagggagatacacgcatggaagctctgagatgtaaaatagcaaaggcatgttcaaggaaggatgatggtctggtctggccagaacagaagagggtatgtgggagtgatgagatgaacccacaggagttggagtttcactgtgtcaaccccttagactggtaaacggggagctgagttttgcatggagacctctttgccatcccctgcctggcaagactgagcctgttgctctctgtgcctgttccctcaacatgctcaaccctttggggagtttgggaagtctgattcctttccttggtgaagtttgctgtgtgctctcaggatccactcagaagccagtgcaaagctctgtttcagaaagattctgccccccacacctgggaaggccccgtaactgaagaccacagagctgatggatgggagatgagtcacggatggaaggaaaggtttttctgtgggtggccggaaggagccctgcttctggatcttagaactgtaaagacacatggctctgtggcccaaatgagaagccatgttcagtgggctgccctggaggagggggctccagcattctgcagagttaactcatttcatatcatttcccctggttggtgtcagaaccctggatgaaaccaaaggcctgacagcttccacgtgtggtgtccactcctgacccctttggcagggcacagagctttttggcatctgcatatcagggagtaagagtccattgcagtaaatgaaatctttctaagattattattacttaaagtctgatacttgtttaaagaaggattctgtgctgggtgtggtggcacccacctgtagtcccagcattttgggatccccaggcaggaggattttttgagcccaggagttcgagactacagtgagctgtgatcacaccactgcattccagcctgggtgacagggcaagacccaacccagtatctgaaaaagaaggaggactctgtgatagatggaataatgacccctaaatatattcatgtcctgatcttcagtacccatgaatgttagcttatgtgacaaaagggactttgcagatgtggtaaattaaggttctggagatgggagattatcttggattatctgggtgggccaaatgtgatcacaagggtccttaaaagagggacacaggaaggtcagagtcagaagaaagtgacgtgatgacaggggcagcgactggagtgatgcacgttaaagatggcggaaggggtcatgagccaaggaacacaggcagccactcaaatctgaaaagggcaaggaacagattctcctctggagcctccatgaggaaccagccctgttgacaccttgatttatccccgttagattcatttcatacttgtgactcccaaggctataagagaatacatttatgttgttttaagcccctaagtttacggtaatttgttactgcaggataggaaactaataccaactccataggagatattttctcaaatttgccctgcgtcaatttcacatcttgaataagatacttcaaaaaaaaccccacaatctcactgagtctgcagaatcccagaagagtaaacatccctagaaacactgcaggcatacaggatatgcgcagggtgaaggggcaggcaagagtcagctcttcctgtggaggagagagcaggacagtgtcactggagtgggtgttactcagggctaattataaccatggccttcacatgtgaacactggcagtgtctgggggctgaggccagtgctccattgctccagttaagatcacagcgaaagccaagccgtgtaggtggtgtggttcaggctgggtatccacatgggaggttactgctgtctgtaattgtatcctcaaatggaagagaaagtatccataagccaggtcagcaacctcagtgaagagcccaacgaatttagagcccgcctaagatctctttattccataaaagagtgtgggattgttgtggaggcagaatttgcggctataaatcaaaggcagttctaaagtttgaactcttgtcaccctgcaccgttcttgagatgcattttctgcacagagtggggaggaagggactgcatttggcaagagattgagtggagtgatgggagggagagaatggagagaaaacagaggggttaggtgcagaccacaggttcaggggctctgattacagcaggagaaagactggcaattactaggaggggtagcagaactggaaaaggtcttttgtttgttagttttttaaggatgggaaggtctagagaagtttgaagacggaatataaggagcccaaatgaaggaagaaatgaaatcactagtggagggagtccagggccttaaggatatggaaaggggtaagactgggggtcagtgcacaagtcgggagagcatcctctccaccgacaccagaggaagggtgggggatggtgaggagctcagtacagagttgggtggaggccgttcttcactgctccacgtggtaccatggaggcatccagagccaggccacagtggtggatgcagaagctccaatctggctctttctggagccccaggctgtagatacacactctacatgaggctgaggtaagcagaatagggatttgcctgctttaacagattatgaatttgcactgctgtaaagcaggggctttaaagacagaggggttctgttttatcttcctaagatcggcaatctacggtatcatccagagaccaggtttcttctctcccgttgctctgccatctctggggcatggtgctcacctgcatgggcgaggctggcctgccagcccccagaaaagagcaagaggagggcagtctggaggtggcacttatcacttctcaaaccttacagccacacctaactacagggaggctgagaaatgtcattcccttgggtggccctgtgtccagctaaaatgcaggagtctaggactgaaaaacagaagaggagacaaatattaggggacaattagccatttctgccaaaggcttcagacctaagcctgtgtaactgtgagatctgggtctgcatgcaggcgtgtgacttcacctccctgaccttcatccttctgtaacatgagaccactgtgcacaccaggcatggcgatgagtaagcagcagccatggaggcacctggcaggggcccagaactcagtgggcatgcagtacctgctgttgtttaccgtcctccctttctgccctagggaaaccaatgtacctgcacatcggggaggagatagacggcgtggacatgcgggcggaggttgggcttctgagccggaacatcatagtgatgggggagatggaggacaaatgctacccctacagaaaccacatctgcaatttctttgacttcgatacctttgggggccacatcaaggtatgtgtctctctggcagagtctttcaacccaaccaggagagttcctatgatgtcagcctctagacgggccttcttggtagggatgagggtgggggaacaggaggtgggatcaaggggagggcgccttctggaagtttgagaagtcttatgtattatccattagtgtgcagctccccccccaccaatatttgggaataagagagatgatggagctaactcagcaacaaacagctctctgctctcggccacgtggtacacatcacactgtttcaacattgccttcattccttgtcttcattatttcatgattacttcattattgccctgatcacttcctaaaagaactagcatttaacttgcaaaaggtcacatttacaatggatccattaccatatagataaaacaataagcaggtgagaggaactagaagtcacagcattggctgggcgtggtggctcccgcctgtaatcccaacactttggggagccaaggcgggtggatcacctgaggtcaggaattcgagaccagcctggccaccatggtgaaaccccgtctctactaaaaatacaaaaattagctgggctggtggcgggcgcctgtaatcccagctacttgggaggctgagacaggagaattgcttgaacccaggaggcagaggttcagggagccgagatctcaccactgcactccagcctggtgacagagtgagactccatctcaaaacaaaaacaacaacaaaaacaaaaagaagttgtagcattaaatttacctgtgagtttcctggctagagtcaagacaaagaagagacatagtgagctgcagggttcttaccgcacaatataggaaaacgatactaatttactggtgcttacgttttcctagtattaagctcaaagaggaatttcttttatatcacaatgcaaagtgccttttccaggcatattatattgcttaagatacccacaatttcttcatgtggtaattggtttcaatgccaatagcataatattacctcagagttttgctaagacagttctcgtaaagctaatatcacgcactttaaggataagactttttggtagtggaactgaagagacaaatggagtgaaacttacagcattcacaatgggggccctactggcattttatgtgagatgactctttgtcacataggcctatattataggatttctatcatccctggcccctactcattcaatgctagcagcgctccccagttattatcaccaccaaaaacgctttatatatccagtcatctcctgggtatagggtggggcagaggtgatggtactgtcctcagttgagaaactcattagtgatactaaagcagaaatagcaggtctatgtcacacaagctgctatagcccccttttcaatcctgagaccagtccctgaatgatcaggggactctttcccactgagctcaaactagccctcagaatcattctcaacacagctctccagggccgctactactggagttgacactccagttgacacctatttttggaagaaatggttagcatgccaagactatccttctttagtagaggttagctgagcctgacttttgacaggattcattttcagactgtgttttcatggtaggcaccctggagggcaggagttccgtgtggtcaagaggttttcttgagcctgaaagaatgggtctatgcatatcgtgaagtgagtgtgtggcattccctccactcacacacatgccaccagaacatgggctcatgaagattccagagtcggtgttccctttccctttgctaggagaaggtcttgggtgggagacaatggcaaaggctcttgctgctccatacttcactgtaacctggattccccatggtcatagggcatgctttttgccagcccactcctccagattatctcagagttatcccttgctcataacacttgatggtttgggagacaggaaaggaggttcaaagtgagccccagctatagcatagctcttcagaacatctcatttctaagcactccatttcctcacaatgtcctctgtcattagcagtgccttgcctgtcttccacagtataagaagggccaggcattctaacccatttgcagagaatatctttgatttactgagtactaagtggagactgacaaagaacaatgcctctgcatctttggaatatgggcaccagccagggaaatcacaaagcatctcatgggctcctctgactctcggttctcctctcctagtttgctctgggatttaaggcagcacacttggagggcacggagctgaagcatatgggacagcagctggtgggtcagtacccgattcacttccacctggccggtgatgtagacgaaaggggaggttatgacccacccacatacatcagggacctctccatccatcatacattctctcgctgcgtcacagtccatggctccaatggcttgttggtaagaacctccttccctcagggaactctggggatgggccatggatggttagcactggaggggtgtttggatgtagacacttaatccagggcctttggggattgaaccatccttagttcaggtttcagaaagatatcaactgggagcagatcaccaaccaaacaggaaggagaaaatagaggtttgtccttaccaaaggtaccaagcagagatgggagagtgattactttgtggtggtttctgggagtccagtttttcctgtacttcattggcatcacatgaaatctggagatcattccacggccacacagcatgacagctctgctaactgcagacagggggatcatgcgaagacccggctgtggtatctacccaacagatttgagatggtgacaacaatgggctttttttcttctgatgaaccaagtgttccttcagagcaagtgctgctgggagaaatactctcattaacaaattggcatgtgtatcagaggcttgtcttgatttccacagataattttcgtactaaattgacctttctcgaagtgaactacatttctatcctctgtaaagtttaacactggacatcacaaaatggtaccccgcaagctgaatctagcaaccagatatgttttgtttggcttatactgtgtttagagaaacatttgaacatttttacactaaattgataattttacactaaattggactttctttaaatgaactacactttatatcctctataaactttaaaaccggatgtcacagaatgacaccctttaagctgaatccagctacacgatgtgttttgtttggcttaaatagtggttaaagaaacatttgaattagtttccatcatttaaaaattaagagattctacataaaaatctggattcctggcttcttttgaaaagtaggatgagttggcaatgcccatcctgcctccctgcatggcaacaatggcttagagcagagtcaaggctgcctcccctaagacaggtgggtgggcattctccagtgtgcagcaggcctaccgtggctgttacaattactgtaaaaccccaggccggtgccactcctttcattgcctgctggtccctgtgggcatttgagtttgtaagcactgctttaaaccaagcagagcgagcctcgccaacaggcatatggttatgggaaaatgaggaggctgtctgtgtgacactagtgtggttctatttgatgtactcttctattataaaggattgtctgttgtttctgtgttttaaatgctctgatttaaaacctcccactgagtaaagagaagagatcatcggctttggagcccagtctaggggggcctgggttcaagggcttgatccacagattgtgagctgtgggaccttgggcaagtagcttaacctctctgaacctcagtttcctgctcagtcaagtggagaaacaacaccaaacacatagggctgtcgtgaggatgaatgagatgcaagtgggtttcatgtggagatgctgtccacacatgaaggctgattctccccagcaggtggtagaggactgtgctggagccattgctggaagatgtaggatttttttctgtctcaaggaaaaaggaaaggagaatgttttctggctgaagctgaaagacatcaagatttacaataaattcagaatgtcagggataagcatgggctctggagccagacttcctgggttgcgattggagttctgccgcttacaagccatgtgatcttgggccagtcattttactgctctgtgcttctgtaaaacggagaggatggcactgcttaccctacatggttgcttccaggattgagcaagcagagaacatggaaagcatggagcccagtgtgtggcccacactttgccctgggtgcaggtctcaggtctgtcctgctccctcatgcgatttgcagaaccagtgcaatggatgcagtcacacctttctcacacagggtggtgatggaggtcaggatacatggtgaagagaacaatgtagaattggttaggaaagataacaggcttcactgagtctttggagctttacttgttctaagcatttttgttgaagttctattcataaatttagcttaaattcacctacatttaactttactaaagagaaagatattaagattactggaagcctgtaattacagatctggagcagtttgaatggaagctgttgtgaatctcagggaaaatacaccacacacacacacacacacacacacacaccctggagtgtggttgtgtggctgtgctttctcactcacttgctgtgtgaccactggcaagctacttgaccaggcaggtcttcagtttcctcacacgtgctgtggagaatgtgatggcttcctctcagggtggttcagttagaaaatgcctgtgaaatgtttttggctgtctttggaatagcaaacctttctcagagtgctgagcccaggtcttagctgcagcaatggactcaaaaagggggaagcggcacaagaatggctggtggcaggggcataggccttgggcactctaggacacccagcagggcagtgttgagagtgagcatcctggcagggctggaggctgggagaggctgggattgctgggagaggctgggagagctgacagaggctgggattgctgggaaaggctgggagagctgggagaggctgggagagctgggagaggctgtgattgctgggagaggctgggagaggctgggagagctgggagaggctgagattgctgggaaaggctgggagagctgggagaggctgggagagctgggagaggctgggagagactgggaaagactgggaaagatggcataggccttgagccaggagtgtgagttcatgaagataggctgggggagtgagagatgcgtggggcaagagggaaggcagcagttcaggggtagcccatggagctgtatctggagcagccacgtgggtcacttctacccacagtggaggtggactcttgtagccagagctgtggacaacctctcagaaccagaagacccttgctgccctgtatgccaaggtctccctccggcctgggtctcagggatgccagctgcaaactgggagggccattgtacagacactaggtggctgaggtaccagttacagcctggtcttggtggccacatagaggtccagcctcactcagcttgatggccaagctggtgggttaggatttggagtctgcaggccttgaggccttcccaaggtaaaaccaaattgtcctggcttagaatctagatgaagtgcaggcctctaactctttaagccagacagacagcagggtaatggagcacattccagtgcccttccctaagatctccaagagccatcccccgcatgggaattgggtttatggattggcacctcaccctgtaaatgctccgccactggggcagagatttccacattcggagatgctgccttgggaactggatgatctccatcagtattttacatttgcttccttcattttggcttgaaggatttactcacggctgactatgtttggaaagatgtttttagctgatgggacaaaaagaggccaaatacagacaaagacgagatcctgatttggaatgcagaggccactcagtagcatcacagaagcctttttcctaaacagcatccctgatctgaaggaggaagagattccagacaagcagatactggctcgggagaaagagggatttgtaggtgtgcagagctgagagtgccttaaagcctggctctgggctgatcctacagtgtcctggtagcccctagctcatgagctcctctctccctgctgcctgtagacaggctctgatatcctttatcctcagaggacagcttccctcatccctaattcccccgtgggcagccacctttgctctttccctttcttcaccaccaactcttgggaagggtggtctgaaattcctccaactcctgcttcttactcctgtcctgacacaaatgtggccttctcaacttttgctctctctgagccttggtgatggttctcaacaatgtcattcaaaatgtcaccaccaagctcagcaaacccactgctgtctctcctgcttcattcaactcctaactctttcttgatataacagttactgtgggcttcagtagaacattgaggtaaaagagcatagagtcacagagacctgtgttttcatctgccagtatggccttgggggactgatggaaattttgtgggactcagttccttcctgtgtgaagggaggatgatgacagaactgagttcaaagggtctttaggaagattaaaccagataatgtatgtgatatggtcagcaatgatattaaatagtattgcttattaaatagtatcactgtgtgcctctgtatctaactgtgttctgtgtaaacatcgctggttctgtgagatagtagcaagtatccaaacaaacaaaaagacactggcctctgtagttaaatgaccttggcaaacacagcatacatgccttctttccctgttttggaaattcacgatgcgtgctagcagagtaaaggcttgcaataaaaatacatgcttagctttggttatcctagcgatgcctaaactcattcgcatcttacagagctggtgttccgtaacacagtttgtaacagagaagcactggaaaatgcttctcactacattgatactgtcagtggtgtctttcttgaaatgcaatggttagcaccaaagctgcaggatgcaggcagatgtggggtgcagtctgccttcaaaggaaggctctacagtatctgtaggctggatagtgggggtgggggatgcaaaatgggcccccacttcatcttaacatgtgtttctgaactctgaggcaggacatagggggattcaccttcctgtttttcctgaaggaaagtaatggaatggtccagtacttttgtggaaggacaaaatgacttcaatatgggttctgcttgtttcctcctcccttccctctttaaggcagagaatgggagaagataccatgctctttccttcttttcctcctcgtgtattgctcaaaatgtgctatctttgacataaatgcttccaatagccacaagatgcttgaaaccaggatgtccccaacaggctgccacatgtggccctgcaggttgtgccctgcactgctccaggggtgccatctatatggactgcagccagtccccaggtgccccagccccagggacacatcctccctctggcattctatgaaagatggctgagccccctgtgtctttggcaggaaatccagggccctctctcctggactcaaagctctgggatttgtgggagaagcttccgcttttcctggttacctccctctttcagtttcttgaattcacattctcaattcttgattcatgtagctgctctcatcttggaactgctcaacaggttcacctttcctgctacttagacagagctgatttatcaagacaggggaattgcaataaagagtttaattcatgcagagctggctgtatgggagaccggagttttttttattactcagatcagtctcccccaaaattgggggatcagggtttttaaggacaattcgatggttagggggtcggaaagggggagtgctgattggtggggtcggatatgaaatcatagggagtcaaagctgtcctcttgtgctgagtcagttcctgggtgggggccacaagaccagatgagccagtttatcaatgtgggaggcactagctggtccatttagtgccagatctgaaaaatatctcaagcactaatcttaggttttacaatagtgatgttttccccaggagcagttggggaggttcagaatcttgtggcctctagctacatgactcctaaaccataatttctaatcttgtggctaatttgttagtcctacaaaagcagtttagtccctgcgtaagacgggggtttgtttcgggaagggacggttatcgtttttgtttcaaagttaaactataaactaagttcctcccaaagtcagtctggcctacgcccaggaatgaccaaggatagcttggaggttagaagcaagatggagttggttaggtcagatctctttcactgtcataattttctaactcttataattgttgcaaaggcattttcaatctctcctttccatatgagcccaaatatgaaacccagactcttgtccttgatttccacaaaagtttcattggcccagggcttttactggtagattggggtaagagatgggagggagagggggtacattacagatcagcaccgaaaccaacactaagagatggagtaacaggtccctctatagaccaaacgcttccccccaggctactccctccccaacctggttgttgagttcttgcccctcctcctcattctcccatcctcctccccacctctcctgggctgccttagaaactcattcctgtccttgttaggcagagtaatttggttgtccgggtttttttcttccacccagttttaatctgcatattcaaaaactcattaagacactctgtaaaacaaataacccaccaccatactctatggcaatcttcttttcagcagttcaaaaagaaattttttaaaaagtaatggcagaagattggaaattccagtcttctttataacatggctgtatttgttgtcgagtttttcattaacataaatcatatcatacccaccctagaaggcagaaacaagtaaagttcacttctatctgcatttgtttgttttaaacagcagtttcttttacttgctgtatacaggttgatggtggaaatcattacatacagatatgtcctgatttgcacagaatggtccattttagacgtgttgtcccagcttaactactaatcacacctccttcacttcaaacgtgtcctggttcagatcataaaccaaataaaatggtcacaccctcccccgccactgaagcagtcgctactggctctttctagctctttgtcaggcagagcccaggagttttctcctacacaatcttatgcctggaccacacgtaacaacaactgaagacttaaaacagtgttcaggaattgctttcacgactgccgaccatcagcaggaaggaagatatccagaaggacaaagagaaaaatacaatttgtgcaagagaatggggggagaacttacatattacttctggttggcatacatagggactgaatggccacccgtgaatctatatgcatgtttgtttatgcagctactatttatgtatctgctatctgtctatccatctatctatatctatctatccatctatctacatctatcatctcaagctatgtcacagtttaaatatttaacactgggtaatgttctaaggaggaacaatcccagaattttagagctggaagaaaatttagacgtcatcccatcacacagggacacttaggcaagtcacacacagcaagtttgtggctgagtaacttgtgtcttctacccccacccgagggctgtcctcggccttatcatgcttccctcttgattctgtgtgtcatcgtcaccccactcctaatgagaagaaagaaatgcagcccaaagtgagagcgtctttttctttctggcattgttgagtattgattgacacacaggttatggactcagacagatggggaatcaagtcccaattcggtccatgcaaaagaagtgacttggggcaactttctaagtctgcgtcacttatagaatcgtagttgtgatgaggtttaaataagacaacatgtaaaaacatttggtatccaataaacagcggtcatttttcttcctttcaatgaggctttttctctcaggagggaatttttttctctggcattttttagaataggaatatacctaactcattgtttactcctattcagagaaagactacccaaagtatgatccacacagtagagtaaatggatccctaagatttagaaagagctatgggcaggaggcaggaggcaggaggcaggaggcaagaggcctgagtttgatcacagctgcagaatgaggttgctgagcatcctgggacactccacatcccttctctgggccttggcatcctcctctgtaaagttggaggcattaaacttgacctcagatgttctggccagctcaggaagcccacatttccttgcctttttctcccatgcttgtctgtccaggctatttataacaaacttttagggcttaataggagaaaggaaagcagtcccattggctgaccttgatattgattgacttattaaacaggtgaataggattcaagatcacacccttgcctattactaaagatgaagggaaggatgtttattcagaagaacagagagcttgcctggaacagagctacttgcttgtatgttgggttctcccatatggagtgagtggacacagaaaaccatgctttctgccttgaccttgtacatatggcttatgtgacctttggcaaatcacttgctttctctgagtctcgttttcctcgtctctaaaaaaaaattaaaattgaatagaggatggtgtgagatttcagcaagattaaaaggtataagaggccagtccactgctgggatatggagtgtggtctgatgatccttttaaagaatggctgcctgggagttggggagtaggcggctgtcatatgaaagaccctgggccaggtgcagtggctcacgcctgtaatcctagcactttgggaggccgaggcagaaggattgcttgagcccaggagtttgagaccagcctgggcaacatggtgaaagcccatctctaccaaaaatacaaaaattagtcattcgtggtggtgcaaacttgtagtcccagctccccagggggctgaggtgggaaaatggtttgagctcaggaggcagaggttgtagtgagccgagatcatgccactgcactccagcctaggcaacagagccagaccttgtctcacaaaaagaaaaaagaaaaaaaaaagacttgaaggaactgtgatgtctacatcagggcctctcaatcagggatgattctgtcacccttcctccctcctacccaatggaatttttggcaatgaatgtctggagacatttttggttgtcacaactgaaggggttttcctggcatctaataggtagaggccagggaagctgctaaacaacctgcaatcacgggacagcctctcaaaatgttcacacagtgccagggtggtaggtggaggattgttgctggtcggtatgtggattttccagtgcttggcatggtggcaggtactgaataggtgtgggttgaattgatgtcatcgggaatcaggaactcccttggtggatgacatcatcgggcagtctgtacccaggggtggggatgaagggtgtaagataagtgaggtttttctcaccattgccccactatggaacaggccaccttgcaaggaagtgagcatctctctggagtgtctgagcagaagcagggtacctgtttgccagttatgcttgggaacagagtctgggattggacaggggggtggggcccaggctacaggccctctgaagacctgagttctgagattgatgagtttagagatacagacacagaaggggcttcagagatcatggagttcaagtccttcatttttgcggtggaaaaaaaagtgactgaagagaagataggaggcttgtctaagatccccgcgctgcttggatgtgctgctgaaactgcatccctggtatctcaatatccatgcaaatgttctttctgctttccccactaactgtgtgattccaagaaggaaaccaaagagctggagtttgcagccctttctagttctgaacccaggcgttgcaaatgtggcttgatgcacgtcttgggctgacaagctggcttggatttctgaatgagggtacaataaggagcatcaatattggtcttaataaaaagcacacctgccccagctcaggtgctgctcctagatgaagttccctcgtccacccttactcagtgggatctcctctgtggagtccctccacggtaagtccttgtacacagggcactcagctgtgtgctccatcagggtgggtgcacgtggcccagcccatggcctcctcttggattcaccttctcacgtatgatatcttgccccctttcctaccctatagagcctcaccacccccaactcctccagctggaaaggacttttaaaagtcaccatccctggcacggcgcggtggctcacacctgtaatcccagcactttgggagcccaaggcgggcggatcatgaggtcaggagattgagaccagcctggccaacattgtgaaacccagtctctactgaaaacacgcagaaaattagctgggtgtgggggcgtgtgcctatagtcccagctactcgggaggctgaggcaggagaatcacttgaaccctggaggcggaggttgcagtgagccaagattgtgccactgcactccagtctgggcgacaaagtgagactccatctcaaaaaaaaaaaaagtcaccatcccatgctttgtcccactttccccaggcctatcacttgtgtcatcttcatctccaaacctccagtgctcctcccagggcctggtgtacggctgagactatttagtgtttgttgaatgaatgaatgagcacatgagactatttagtgtttgctgaatgaatgaatgagcacatgagactatttagtgtttgctgaatgcatgaatgagcacatgaataactggatgcttggtgaaacacccctgtcttgacccctgcagatcaaggacgttgtgggctataactctttgggccactgcttcttcacggaagatgggccggaggaacgcaacacttttgaccactgtcttggcctccttgtcaagtctggaaccctcctcccctcggaccgtgacagcaagatgtgcaagatgatcacagaggactcctacccggggtacatccccaagcccaggcaagactgcaagtaagtgcctggacccctctctgtgtgctggggggaaggggtgtacatgtgtgtgcatgtgttcactcagctcagcccagcaccagacttctgcacttcggggctctgaggagcttgggcctcacagcccttaaccacctacggctccagcttcctgcaaagcaggtgggagggagggtgtcttctcccttctcccttctcagtttgcctcatgtgcatttttcttgtccaaagaggatccctgttctcatctgtggggcttctcctgatccacacagtgctctttgatgagaggaagtggctgacacctcgcctgccacagaggccccgaccacacagacccttttctagatattagagagacagagggacggggtgagagctctctgtgcagtcagccttccaagtgcagggcccctcccttagaaagggctactttcctgggttcttctgacctgcatgtattttagagtcaatctcagacatcacttgcacactgcttctattttcaggacccatgctctttttaatttctgaatattttaagtgcttaaactagcaccacactttaattagaaaactgggtttcagatcaacaagtcaatgatttctcagatctctgataagagactatcaggccaatatcagagtgcccaacctgcacctgccatgtggcaggatgacccctggcggccctttatctgatctcaggtatctctgccctccctgcagtgctgtgtccaccttctggatggccaatcccaacaacaacctcatcaactgtgccgctgcaggatctgaggtgagcagaaatattccttctttggcagaaagtgagggtgggggctggagtcagggagacagccgaggcttaccttgaaacatgtgtgctctgagccccaagcccagatatccatgcagacgggcttagctgtggtgaagaggaaaacgacagactgggggtggtggggcagggggcgttctttggacttggttttaaaggacagccctgtcacttcataatactggtgaccatagttagtgaacactgaacgctttatgtataataaatcattagaatgccatgattttagcttagaatggtacctgacacatcagtgttgtaagctcacataatttgatttttgtaagaacccagtgacgtaggtattattattatccccatctgatgggggaggaagctaaggttaggagagctgacatgcccaggggcacacgtagctgggaggtggtggccagagtggcagcacggcactccatccacacagccctgctctcacccacccgtccatgctgctggccttccatgggaccctgaccttgacctggaacttagcttccttatctgtagaatgaaggggaaagcagagaacactcatgaaatccccccattgtgtgtcaggaagaggagtttcagccctgcagtgattgaaacgcagcatttctgagccatgtctgatagagtagggcccatcaagggctttaactgtcatggtgggctctacttttcactgttttccccccagactggaccacatggaggtgtgttgggggtgggcaccgagggctcctgtgggtgacggcagtagctactagacccatctccggcgtgggccgcgtggccaccttgcccaggagctctctggggctgaacgctgtggcttttcccttgtgtccttccccaacaggaaactggattttggtttatttttcaccacgtaccaacgggcccctccgtgggaatgtactccccaggttattcagagcacattccactgggaaaattctataacaaccgagcacattccaactaccgggtaagtctttccaggctgcgcctctctggccagcctctcggtccccttcccaggcctgcagatgattagagccgggacagccagttggcgacagctgggaacaactgcattcttaatgctggtctcgaagaaaatggagcagccttgcgaggcctcccaggccattggccacattcttcaacacaaatctcctgtggtggttcctgcacgggcatggactgagaatatggccagagccaaaaggagcaagttgtgccttcactcatgctgacagggggagagcttctcttggtggcccctgagctgggcacctgaatttggtttgcaattcacttggcggggctgggtgtagcctcaactatgaaaagttaggcctgatccataagctgaaggaaatcaagacgtggttctgaaggaaggtggaggcagcattggcatcctctctgctgttccctcttgtcttgtttcttgggaaatgaatgggttgctgcatctgcacagagctaagtgggcaggtgggacacaaagtcctcagtcatcttcatttgctcatcaacatctcctaagcacctgccgttgtgtccagcaccaagctaggcactgggggacagagggcataccaagatgaccgggatctcgagtctgtcaaggacttcccagtgaggacagcagtcaagaccagagtcatggggcatgggattggagcttggagcatggctgagaccagagacgctctttgttggggcagaggtggtctcaaggatgccagggcggtgcgcagacagactcccaaatgcctaggctggttttctggtccaatccctaatggtactgataaagaaaaactgacgttcctcaaagggaacaatacattcggaggcaaaaagtaaaaagatttttaaaagcccaaccagagagaagaccaaaaggaagagatgcagtctcagaatagacctgtgcttatgcctaggagatagggtggggcaaggggtaagcagttgcagggtggggtggcagaaacagaagcagagtccccaggcagtgtcatttcccagcaactagaaaagagggtagtgtcatggggcagtgagcagaggtgtggaagacaacagtctcatcttgacagaggagaattagtgccgggtaacagagagggcatttctgaagctgacatggccctcagagagcaatctccatacagagggaggtgcagggggcatactgctgttggtggcagggggaacagtggagagaatgtgttggctgcttgtcgagaaacccctcacacgcaccccttgggaaggcttccatgagcagggaggtgggccacatagaacctagcaggtgtggagaggctggaaaggggaggagtgcatgcaggtgaatggtttctaacaagcaggcatgcaagggctcatgggtgcaggtggggatgggccttgaagaaggtggcaggtctcattctctgaggcagggagggaaggagtgaagaagaacctccagctggatggattcgattgtctaagccaaggaggaggtctcgtccttggtgttcatgcccagtaagccttgactccacatccacagtgagagggacctgttccaggaggcttcacctggggtctcttattgggtcctcataaccatcctgtgacataggtatcactagcccatcttgcagatgatatgactaaggctaaagaggtgaagggacttgcccagtcatagttagtgggagtagagctgcgagtcaaccccacatcatcggactcacatcaccgctgctgaattataagccagagggagaatgaaacggccacagtgccctccagttatctaaaaaagagaaatctgagtatgagcattcacaagaggccacgagaatccagacaggaatgaagactgaatggtggcctccctgggcagcatcactcagctgccttgatttctccctatcccatggctgacaaagtggacatgtttagagtcaaacaagaaagccagattctctcttcaagacaggcaggagctaaaatgaaactgtgggaaggtcactgaccccagcccaaggtaaagatgggacttaggttcagcatttcctttaaatcacagcagataaatttcctaagagtatatacctgttgttcctgacttggggcctgggctaataactatctaaagcagtgtgggtctgcacatggactttgctatgtggccttggacaacatacataacctctctagacctcagtttccaaatctgctcctcaaagaggtcaaatattccagatttggtctgagcaatgcagaataaggcagcatcttcacctcccttactgtagatcctctacttctgttgatgcagcctgagaacagagctggttttcccggagcattcagaagtatgcagtgaggctgactgtgagacgatgcctgtagcccacagtagaaactaatgtgtccctgaatatctcttccctgcaggctggcatgatcatagacaacggagtcaaaaccaccgaggcctctgccaaggacaagcggccgttcctctcaatcatctctgccaggtaatcagccattgggaagacacagtccacggtgaccttgcagtccagctcctgcctccccctccttcaatcactcattcattccctgagcatctgttgagcccttgctttgtgctgggctttgagctagttgctgggggtacaatggtgaaaacctgagcagggtaaagtctgaattaggattctggctccagcagccaaaggaagatagaaattcccagaggtttctagatccctcagcaaagtgaatagctggtaagtcagcagaaatgagcagggccacagtaggttgggccaggatgaaaagatgaagagaacagaagggaagaattttaccatcagtttaatgggaaagaacatgcaagtcatgcctataaataagcctactgttcagctgaaggccaggggcaacttttaaacctcaaggtaattagcaaaaccaatctcctttaaagagacaagttgcttggtctccatcaaaagtgggtaacactggtaacatgatagtgcactccgttttgtagctaagaagtgctcagaaaaggcactagttcaaggtgacctgccagttagtggaagagctgggtatctccagactcttctcctgggctacgaggactgtgttgcatgactttgtgggaatggctgtctgaactgtcctctgtgttttggccccacttggggcaggttcttcagtatgtgaggagcctgcatgggctggtggaggagtgacttcttgcttctgtgatgaactcagaaagttcattcaagagcccaggcaatgcgaatgggtttctgttcagtcaatgccttcctgggcactgtgagtagagagaggctcacagagcccagaagggagtcagcagaggcgtgcccccaacaccgccacctgtgccctccccatggttgtgctgcagatacagccctcaccaggacgccgacccgctgaagccccgggagccggccatcatcagacacttcattgcctacaagaaccaggaccacggggcctggctgcgcggcggggatgtgtggctggacagctgccggtgagtcagagcggcgtgtggctttggcacaaagggggcatggcgcgtcttcccctagccccctacagagacaggagagcaaagcagagaggggaagccagacatactgacgtttggccttctggtcccccagccaggcaggggcatagaatggcagcaggcagtggccaaaaaaaacaaaacctaaaagcagcatattggcttcagcctacagtgccaggtgctgtgggttatgattcgcttccaaatagtcactgggcttggctctctcaaggtcatgcggaccatcagctaagggagggaagaagaaagaagccagaacattctaggcacttactatgtgaaagccttggttgcatttctttcttaccatgtttctcaaacatataaattatgatctccattttagagacgataaactgaggttcagtttagtgaatttcccaaggtcacgcagttagctagagtttgaactggaacttggagccacagttcactggactccaagacccaaatgaaaaaggcagggaacgctgagctctcatatgaggtccctatgtgagtgactggcacatgctggacaaggaccagaaggcacaggcagtggagctgggatttgttttcagggagtattgtgaaatgtctccttgtctgccttttgtgttaaaaatgggaaatcagaaacctattaggaaataaacatatttctctattttattgtgaccaagtaaaggagaaataaaggtgaaagggaacaagagaaattgaaatgcgaggagaaaagcagagacacagcattgacagagagagcaagagagagagggaagggagagagagaaaggctgctcagaaatgcagagatctggggagaaactgacttagcattggagccccaggaagatgcttgagagacagagaaggggaggtgcaaaggcttttgggtcccccagccaggcaaggacataggatggcagcaggcagtggccaaaaataaacaataaatttttttttaaaaaagtcaaaaaagcaaaacttaaaaacagaggcagagagactgagcgggtggggggggggggtcttcttttttttttttgagatggagtcttactctgtcacccaggctggagtgcagtggtgcaaactcagcacactgcaacctctgcttcctgggttcaagcaattctcctgcctcagcctcccgagtagctgggattacaagcgtgcaccaccacgccaggctaatttttgtattttcagtagagacggggtttcaccacattggccaggctggtcgcaagctcctgaccttgtgattcgcccgccttggcctcccaaagtgctgggattacaggcgtgagccactgtgcccagccgcagggccttcattttgcacaggagaaaagaagtcattcattttaagaagaagggaagggagaaaagggagctgattctgggtttctgaagggcatttaggggaagggggcagggttgttctgattggctctagaaggcagaagtgataggcatgaagcaggtttcagctctggagaaggaagaaccttcctaccatatgagacaccaatctatgggataagctgccaggctcctcatccctagagcagaccctagagcatccttgggaggggcactacacagaaggtgggtggaagccctgggttgaagagaaactagatggtgtcaatgccgaaattctttgcaatatcctaagttcggtaaatctcttggttctggttattgggcatttcagagtttaggtcccttaagagatggtaaatgccagatttagggcagcaagaaaaattgcgaagacccctcctgccaaagtgtgtgtgtcttttaatcccccaccagactcattccaaggtagcctaggatctgcctggcaccaaggctgtggtcctacgtgtggacaaggttggtgcaatcggggctgacagaagacagggatcccttcaaggattggaagaatgaggggaccaggagcctagcactgggggacagaagcaatgaggaaaagccatggaggggcctgggagataagactcaggaagtttgggaaaataaatggataagacagtgccctaatgatgggactggaatgactgatttgaactaaatgggcttcggaaaaagaaaaaggtccatgtgtctgaaagagggtgagcagaatatgaaaaagtacattgggaattagagagcatgcctgccaccaggaccagcctggtgcagctgatgtggattcaccaggcccttgagcttggatctatgaaggatataaagccacggaagttttagggaccagagaggctggtgagaatggcactttgagatgagcctggcagggtggacaggacagatggaaggagcagaggcatagagaccagttaaatctacccctgggacacaggaagtgaaggcggccactgtatttggccctagggtctgtggtagcacagacccaaggctcagctctggattctgtgtaatcccttgtccctcgcaatcagacgccccccagaagcatgctcatctgacccctaaaaagggcagaggtgaaagggagctgacgagatggccccagagcaattgcaaaatgacttcctgcccttctcagggtcagcatctgcctggcttcctggaaacttgaaaagtagctattgatgcctctctctatggctgaaacagcagtgaagatggtaaaagaaaaaaaaaatagaagtgcattcacatactccacctttccctggtgctggtcctgagagcggaaggcccttcaagttctcctgatccaacctcacactaagccctggaatcacagaggatggggctggagagggaggcatatggaccccagtctgcatgctgtcaatgccgttgaatgtggagagccacaggggtcactgctttctctctagagtcagagtgggaggggacccagaaaatccccttcctgtgcagaacaggagagccacaactccctgagcacgactctgcttatgtagagactccttcctctgcacggtattcagtttgactccaagggcagggaagtgtccttctctccacgactccactgaatgtgaagccagggcatgctctgactatctatctgctcttgcccacaggtttgctgacaatggcattggcctgaccctggccaggtaagggcaactgtcattgtacttggtcctctgtgggatcttgtctctgggcatctcaccttaaacatcttctctctacagtggtggaaccttcccgtatgacgacggctccaagcaagagataaagaacagcttgtttgttggcgagagtggcaacgtggggacggaaatgatggacaataggatctggggccctggcggcttggaccatagcggaaggaccctccctataggccagtaggtttgcaaccatgtagctccttattctgagtggcttaacctaagtggctgtgatggaagggaaaaagttaatgggtagtttctacctgttgactatgaattcttctaccagccagaggaatcactgaggtgactgagactaacaattaagggatgaaatctggaatggggagagagaagtcaaaaagtggtgttgaatatgagtcaacagggtgacgtggccatcaaaatgcgtaatgcattcctgggctatgttaatgggaatttagtgtgtctgggatcagggactgtgagtccttttctctgacagcactctcacttggagtgtagcatccactcctgaggatggcagagcaatagagtcaggccgaagcacacttaaaggagaataaccaggagggtgacaaaagccgaagctatgtcacatgcaggttggggtcttcaaccagaagacaggatcatcactttggggacaacatgggggatattgttacatgttctcagagctgctgtgcacataggggatgagactcattctacacgggcaccgtgggttagggttggtttagtgcaagaaggatggatctttttaatgtcagatatgctcaacaacagaatagcaggactgtcctgaggagtcctggtttctgcggctgggggagttcaaatgaaggtcagacgataagcaggtgggtggagaatgaatgggtgacttggaagggtgatgagcaaacagggataatggactcagtcaattccttggaaaaccacaggctgggtcagtggtgaggaaatctcctttcttctgctggtgtttctgctcaggtgtgaattcaagccagagagcaaggctctgagcctgtgagcagcatggtagtccctgtgctcctggtgataagatcagcccttcttgtctgtctgagctttctactctttctctaggaagatataatttctactactagagtcaggacacaaaatacacattgacctaaaacttccaacccaagtggacatggaaaagactttgcaaaggcaaaatcatggtctccttcagcatgagctgtgagaagcccttccttttgtctaacctgagtaatggagcagtccctttcagcatgtgtatgagtgaccctgaatccgcacgttcaaggtttctttgccaagggttaccagcctcccggggccagaatgctctgatgacttccaaaggtgatcctgtttatggaaacctgtcagactgaggcaggttcctcaaattgcatctgcaagtaggaacctaagagcctgcagtcctaatcatggttgatccatcttgtatagagctgggtcagggtctgaagtgcaaaacctaagtatagagctagtaaaaatggactgtccctaaaatatgtgaaatgaaaaaatgcatggagccaccccttgagaatcaggattctagatcatgatgttaatcaattataaacgtaaaaatatagaaatgcaaggagtctttggtgcccactgaaggcatgttaccgtgactgctgtgcctagggtcttcctcaaggaaccatattggaatggaagggagcccagggttgaagatcagggacaactggagtatggtctctccctgtgggcagatattttttctgcttctttttccatctttctattttttcttctttatatttgctgtggaagacaatgtgcttgacccagatacagagacaccagcataagcatacatgttgggtttggagaaggagcaagcctagactggggccaggcccaagaaggaccaccaggaagcccagccagcctcgcagacccttgcttcctgtgctctgctcaggagtctgaggcaatgggagaagtgtgtctgagcaacctactccatgctaagccaaggcaaaatcttcaagtcaccagttcttgtccagtctctcctacctccacgtccaagcctgttgccgcttcccacctccttctgggtctcagggccttcttggggttctctgtcagcctacagtcttgcttttcagtggggcctccctttcttctaggggtgctgaaaatgttgccttacaattatttttatcatgtttatcaccttccattctgtgtccttttcccctctgtttcccaaacccagcacactgccaatgtgaaaggcttactcccagaggagaaactcatgtgggtcttaatctgatttaattgttatagcaactaaaactaaggcgataatgactaacagctctatcttcccaagaaacataatattggcacgctccagtggtatttacagtatttacccaatgactctttatgtaatggaaaaattggggaaaatgttgaaatacaggaccattctccaaactccaaactagcaactagatggatattcaactcatccatccattcatccatccatccattcacccggcagtcattcattgacacttagtgtgtctatacatgctttaaattaattaatgaattaataattaattaataatgatctggggcagggggagtttctagaggtggggatcaggaatggttttacccaggaagtctctgctaccatccacctcagaaggggcaaacatggcgtttagactgacgtcttacttccttaactccataggaatggaaaacatttagactgacatcttacttccttaactccgtaggaattttccaattagaggaattcagttatatgatggccccatcaacatccaaaactgcactttccgaaagtttgtggccctggagggccggcacaccagcgccctggccttccgcctgaataatgcctggcagagctgcccccataacaacgtgaccggcattgcctttgaggacgttccggtgagtgaggcgccagggcagactcccggcaaacccagactttggatggtgattcacaagtcccctgggtcccagagtttgagctattgccaccaccgcaggggttgagaagcctcctccaactaggctgggccatgtcccagtttgctcttcatccaaactggaaaagtacaagcgtaggttgccccacaggtcaggtctgggtaaatgcccgcttgctctctccctgctcaaaactcaggcgagcctctggaggaacccgacgtgtggactgaggttcctaggctgttcctccaagggacttgactttgacaaactgagtcttctgaccaggccacctgagttggcacaaagaatctaacaagccccacagtttccaagggaagtcttagctgatgatgttctgtttaatctctccccgagagcagactataaacagaggcctccttgccctagacagagaaggcagaagaggggcggaggattaggagatcaggagcaagggctgccctgtgagaccagccggggccagtcctcctgtgcatttccttcaggttatggattcccagacttttccctccttctcctccctgctcctgccttttgcctgtttgcccagttcctggcaggctgagggaaacgatgtgaaactgaaatgacttaatgtctttactcaggcaactgagagcctgaaagaggtcagttatggaaatctgcaagggctcatgctgcaaaactgtcttcctgaaacgtgccacatgcatcttctctcgcacacggatgcccccgtgtatgtgtgtgtgtatgtgtaaaagtgtgtgtaccctttctcatacacacatcacccccacctccctctcacacacagtcacactcacagtcctcagtccccctcctccatctctgcagttggtgaaggctgtgtgtcagagcagtctccaagctcatccacagcagccaaccctccagtgagcagaggccaaaagcatgtgctaggtctgggagttgaggcacagtgaacctttgactgtgactccggttgcatcggaggggtcagccacgtggtttctctcagtgcccgagagcatctttgttttggctggcttgtaacgtcagtggaaatcggaaacctcgccctggcctgatgacggctgcagtttcccttcaccttctagccctgcctaactttcctgggctctgtttagattacttccagagtgttcttcggagagcctgggccctggttcaaccagctggacatggatggggataagacatctgtgttccatgacgtcgacggctccgtgtccgagtaccctggctcctacctcacgaagaatgacaactggctggtccggcacccagactgcatcaatgttcccgactggagaggggccatttgcagtgggtgctatgcacaggtggggacaccattctgggggccggccactcacttattcactcatgcaacaagcattcagtgagtgtctactctatgcctggctctgtttcaggccagaaagagatacagaatttttttttctttttctttctttccttttattttttcccctcacccagtaggatttttacaaagttaaagtcaaaacacttggtgagcaaaatgcttagaaaaaaagaaccctctgggtcaactgcttcgattcaagtcaggctccaacacttaccattggaccttgggcaaattacttggtctcttggagcctcagtttcctcacctgtaaaatagttgaactttcctagcgagattttgggggtggcttcagaaaatacaagtaaaatgtttcatcagccttatccaatagaaatataatgcaagccacacatgtaatcttaaattttctggtagccatgttaaaaagtaaaaagaaacagaatttaattttaataatactttaattgtattaaaaatactatcattcaaaatgaatcagtgtagaaaatcattaaaaacacttcttgttttttttctaagtcttcaaagtctactgtgtattttacacttatagcccactcaattttcaaccaagggaagtgtagtcctactgaaacaataacgttgtgtttaatgtgaatttttaattttatttttaatttatttttgcatttttattgctatatcatagtatattctcttggagaatgtgtgatatttgatatatgtatacaatgtgtaatgatcaaatcagggtaatgggataggaaaaaatatttacattgcttttgttttgaaatttaaatgaattgaagtttaaaattcagatcctgagtcacagtggccacatgtccagtgctcagtggccacatgagggacagggcaggtctagatggtgcctagaacagggcagaacttaaaatattagttagctattattatattattgttacttctagtattttgatgaatgactaatgaataaatgagtaacgggagagaggcctgagaaaatgaattgtcaggttcacagtgagccaggtcgtctcagagaatgaaggaaacatgtatgaatagctgtcttcacaactatcctacaaggcaggcattattatcaccaccgtgggtgtcaggaattggggtgttagaaaggagctaaatggtggtttgggggtggaggagtgataggagagggagatggtgttgggctgaaggaaaagggccataaggggcaaagagggcacagggtgcagctggtgggggtcaggtgccagagtaggtggcagggctagcatttagcaggaagaaggaccagaggaagacagggcagagggcaggaagctgagggtgtttctctctgcagtagaatgtgatgtcatgtgctgagaatgtggggactgggcttgaggaaagtaacctccagagagcgataaagatttggaagagttgctgtagagagtggaaaatgttgacaagaagcttgtggaaggagtgcctggcagtgttgaaaacccagtggagactggaggcggtgcatttgcagaggcacctctctcccaggctgtgggattttctcagccctgctcaagagccctgggagaggcggagctgtgcaatgagccatggggtggcttctgctgtaggtgtgggcagaggaagggccaagatgctaatgggagtgagtggttgatatgatgatgtgaggaagataagaagggaagtggggtcagaagggagctgatggaggacagtcatgtcctgaataattgaaggatgaccaaaccctcaagcctggcatccacactgtcagcattacacagcctcagctcaaggtctaggtatcccatatggagccttgattttccttcccacactttctttctgatatgttgcttatcttctgtgaaaaaaaagctcatcgttagagcttgccagattatcataactggcaactggttattaacggttattcataatattttcccttcactttacatcttacaaaatgctttaatgtacgctttaccttctgatactcagggcaacttcctaagatgggcagggttggttctctttccatcttatatgcgataaaactagaggggaagataagcacttccttccaaaagcacaacatcattgcacgttggtgtgattgtctctcttggccacagttatggggatattgtcttatgaatttgggatgtgccataaaacaggacatggcgttttttttgtttttgtttttgttttgagatggagtttcgctcttgttgcccaggctggagtgcaatgggcaatggcgtgatctcggctcactgcaacccccgcctcccaggttcaagcgattctcctgcctcagcctccctagtagctgggattacaagcatgtgccaccatgcccagctaattttgtatttttagtagaggcagggtttctccatgttggtcaggctggtctcgaactcccaacctcaggtgatccacccgcctcggcctcccaaagtgctgggattacaggcatgagccaccgcgcccggccaacacagtgttttaaaccaatgctgggataaagcatccaggctcttaggtccctggaactcaatggctgacagtcttgctttcagtttttcctctgaaatgaggcaccatttattcatgcagtgtgttgtggcaccacaaggactggcctcaggggccagacactgagagggagtaggagggagaagtaggccaacacacccaggcactctctaaaatcaggcagagcaactgccagttataggcgagttgcattttatggtagaattaaaaaagttctctctctctctctcttactcccttcctcctccgtccacatctctgtcctttgtccaaaatttgccatctgactattatgcagactcttctcaaatttccactggaagctcaacagagcacttttatgaagatgaacagaaagcattagctggattacacagtaaggcctgggctgcgtccatcagcagaaagagatgtccccttatttggcctttctttcattcaagccttctaaaaagggttctgtaaagagaaagtgcctttgaaagtgcggtctatagtcagatgttagccagacgctcttggaataatccttcgtaatagcctcattgtgtgtttcctttttgggttttaaaagatgtacattcaagcctacaagaccagtaacctgcgaatgaagatcatcaagaatgacttccccagccaccctctttacctggagggggcgctcaccaggagcacccattaccagcaataccaaccggttgtcaccctgcagaagggctacaccatccactgggaccagacggcccccgccgaactcgccatctggctcatcaacttcaacaagtgagtgggtgtccagccaggagcagtgagctcaaagctgataacgatgccttgttgcaaagtcctggacttgcgtctaacgaaaccacaggctagcccatgtgatccatgcaggagtacctagaggggttgacatcacccaggagttaagaattaaaggacacaggccaagcccccgctccagcatgggtaaccttggccagcgcacgtaacctcttgagcctgagctccttgatctttgagttgaggatagtattaccttgcaggagtgcaatgaggacccaaggagataaggtatggcgggcacccaggacctggcattagccagtgctcgacagatgacaaaaatatctgggtattgttgttaccatcctacagagagggaaacgaggctctgcgagataaagtgttgaggccgagggcatctggatagggcttcatatatttagattctagtattttctatgcacattatttacttgtcacagtatttctgtgagacagacatttaccagatgtgggaaatgagaccaaagcgatgaaatcggccctacaatcaagctggacccagaaggggctcagcctaggtcctttggatcctgtgctctttaactacgaaaagaatgtctttttcccaaagttccatatgcagcacccccagggttggccctggagacacaccagtgaagcattcaggctctttgctcatgggcagccattgtctctccctctctccttgaacactgcaactcagtcaccacgacagcaaatgtgctttcaaaatttcccatacaaaagtggaggtgtcatttggtggagattttttggtctctttctccaaggcatgctccaaaggccctgtggcctggacacccttgcttgtaacctgactctacttccaatcctaggggcgactggatccgagtggggctctgctacccgcgaggcaccacattctccatcctctcggatgttcacaatcgcctgctgaagcaaacgtccaagacgggcgtcttcgtgaggaccttgcagatggacaaagtggagcagagctaccctggcaggagccactactactgggacgaggactcagggtgagcaggcgcccacttggctgcaggaaagtggctcaacctcatcttgtccccttggcctttccaataagtctaagaacagccatgtagttaatgccaattaatgtaagacacctttctaggcattttgactctaaggctgactgtcccatacattaacgacatttttaaagctattaagctttaaaagtaaaataaacaccctattaaatatacatgtgaattgtagggaatttacatatttcagaaaaaaaaaagtgaaggcagtaaatcttagaatccagaaaacatggtacattatctcaaatcctcacaacaacctgcttggagcagaggattaagagatgggcagctgggtgtggtgactcacgcttcccagcactttgggaggccgaggtgggtggatcacaaggtcaggagttcgagaccagcctggccaacatggtgaaaccccgtctctactaaaaatacaaaaattagctgggcatggtggcgcgtgcctgtaatcccagctactcaggaggctgaggcaggagaattgcttgaacctgggaggcggaggttgcagtgagccaagatactgccattgcattccagcctgggtgacagagagagtgagagatgggcaaagaaggcacagggaaaataggagagacttcctgagatcatagcataaagctgacccagctggatttgaacctagatctgtctgtcttcaaagccctcacccttttgctaacctgcactaggttctattcaatagagatataatgaaaacagagtatctgtttctgggagttctttgatcccctctcttaaaaagaaatttcgtctaatgtcttaagaatgccaacccagctccacagcaacgtcgatagcaaactgtgaggagtaagggtaaaagatcagttgatggccagttttctattcttatatggaagtcaatgataaagaaactgataacagatgatctatcttatttatggctccatcaatttgattaagggaaaattaaaatttagaatcaaaagtataagtaaaatgttgggatgggagggcaataaaaaacacctctttccccacacaagtgctacgccagctgggggcagacaagctggcaggggaagaggaagtgatccaccttactgatgataaagctgttggagaatagagctttccaatatcatccccaattttacctcctccgccccagggagcactgggcaattacaggctccccacatagggcccagcccgaaaacctcagagcatggaagacagaccagagtgcccctgctctacgggctgagccaaatacccaaaaccaaccaattatatgagacactctcttcccatgggaagaagtggatgaggggagggcccaggggccaggagtatttaggaaaatcctcccatatgaataccagaggaggaggagtgagatatgccccacataccactaggaaatattatgattaaagtaacagatgttgataaggtaaagtccctgggataccatccatgcagattttcttctttccggctcatgagtgaaatgttcaaaagatgtgaatttttcaaatggaaacttccactaagtaagttgaacctctttgatcaaagtcttaaaaatctaaggctggtctgcttgtcaccttaagcacattttttggttggtagcatagcttagccctatgcctgttgatcattgtgttgtgtttcaattcagcaacgccttagggaccaggagttgggttatagggggtctgtttcctatggagaagggctgcaaactcttgggcttttaaaaatctttctgccttatacgtttgttgtttcttatactcagagcacctgcctttagcagctaccttctaataatctactatgggctaggatacttaacaaccagcttgctataattaggggtaaaattaaaataagtcagctaaaagggaggggatttcaaagtgtgaaatatataagctctgaatcatctctcattttttccaggttaaaaaaactgttaagtgattgtagctgtgttctggatagctaagtttgcttaataccacctcagtgaattcttataatgattcttactaaattataaacaagtacattatttaaggtgcacagccatcagtagcgctgctctgcaacattacttggtcatagccaggatttgagcactgggctggcagatgcccaggcccgtgctcctttcatgccttccagggctttgcagttcagccagcttgcacacatccaagttgtaggtcaggattagggaaggcagctgctacctaccatgggctggatggtcttttaggtcactcccagtttagataatctgatatataatggcaacaaggaaacctgaatactgttaagttttgtgcagaagcctcaggaccaatcccatttctgtgcttggtcccaggagtggtttggagcatgttgggagcctccagggagacgtgaccatgggcagcactgaactgccttcctcctaagctgctcaaagcgggtgctcacctgcctccccagcttccccaccacgcagggcatggaatgcagatatggctgctctgctctcagccctgagcacgaggcctctgtaacagtcagtttctactttactctgagatcacttgatgtggatggcttgaaacataaagcctctcaaggaagctcagattaagtggaggtgctacagagagaagaccaaggggtcttcaagaaataaaaacccagctgggcctcatgggctcaggtgctgacagcaaccaagacagcagggaggaggtagcctgcctaccccttgtgtctctccatctccccatgttcacacacatacgcacacacgcatggcctcttgtttcagctacttgctgcaaactgccttcctctcgcgattccttagcaggcatggggcacaacaaggttgtcagccccaactccatgtggtcttttagttcaagcaccacccggtggtggacaagacctgctgggtcccataagagcgagaatcttggttactggttggccaatccatggcccctctgtgagtccaatgtgtgcccctggtctgagcagctgtgtggtaggggtttgggggcgagggcattgtggtgcaaacccagctccctagtctgactggactcagtgaagggttggtccccagagcaagatgggtggtagataccccatatcctatcttcccatgtttcagatgcaggactcagcctgaaagcgcttttctgcactaaaagaacaataatgaatcccaagttagtactgtgttttcctcataatctgactccctgtaacactgggtcagcttcctttacaataataattattattttaaataaattataaataatttttggaataaattatggtttggagaaaactagagataggaagacagagcatctcctcaccgggcacaatgctgggatggaaaatgctggctttgtcacttcccagctgtgtggtcctgggcgagtcacttcacttctctgagccaccattttcccatccaggaattcaggatgataatagtacctactggacaggattgtttgaggattaaatgagatatgtcgatttacgatgtgtgcacggcgtggcacatagaacgtgctcagaatagaattgccattctcattagctttttcttcaatgcatttgttccttatttctccaactacatgcaactcggtggtagacatggttccattctataaggccgctgggtctacctgctatgaccagctcagagtaaatgtctcggtgggtgggaggagaagagggaggtttgagtgtccaagcaaatgcccagcaatgctccttgtgtgcaggctgttgttcctgaagctgaaagctcagaacgagagagagaagtttgctttctgctccatgaaaggctgtgagaggataaagattaaagctctgattccaaagaacgcaggcgtcagtgactgcacagccacagcttaccccaagttcaccgagagggctgtcgtagacgtgccgatgcccaagaagctctttggttctcagctggtgagtggctgagagcaaagcctagacccctttgccgtccagtcgggcctagagccctttgccgtccagtcgggcccagacccaattaggtccctcactcagctccataaaccatttcctgtgactggggatacgggaagaggaggggaatgactacccaaacctaacaattacattgggttctatgtgttttccagaaaacaaaggaccatttcttggaggtgaagatggagagttccaagcagcacttcttccacctctggaacgacttcgcttacattgaagtaagtgcctctggcccctggaggattcgggtttgctcattgagaggtgatactgtgtcctgcggctgctggcacaaattactgcaaactgggagcaaggtgttggcaggggtggtttcctccagggggcttggggcggggaacctgttccatgcctcttctcgctcctggtggctgccagcactcctgagcattcctcagcttgcagacacattaatctctgtctttatgtgggcttttctcctgagtgtctgcgtctcacctctcctcctgcctttcttttgcaaaggcacctatctttgaatttagggcccaccctaaaaatccagaaggtttaatcaaaaaatcttttaacttaattccgtctgcaaagattctattttcacataagcccactttcacaggttccgggtggacataacttttgcagggccactatttgacccactactgagggctacgaggagttaagtggataatggagtttacgcttcaaatagatgcataggcaacttctgccttcagggtctgcttgggaaccacctgggcaggagaaccatggggccttggcaccctgcctcacacctggattgctctggctctgtaggtggatgggaagaagtaccccagttcggaggatggcatccaggtggtggtgattgacgggaaccaagggcgcgtggtgagccacacgagcttcaggaactccattctgcaaggcataccatggcagcttttcaactatgtggcgaccatccctgacaagtgagtctgtacctctgcttctggaattggctgctggcacagcagacccctgggcaagggccccctccctctcacaaaggccctcatcacagatcagtctggaaaagctcaggcagtctccacagcctgcccacaaatcatgggtgttggacaagagcgtccttgcctgtggactctggtgttggagctgggctgctgtgaatgtaggtcaggcggaggcaggcgggacagccccgctgcacatgggaaggttgccctggccctcttcactacactcccagcatgatctcatcccctcccacaccttcaatacgatccaagtgctggtggctactatctccagcccggatctccttcctaagcaccagacattccagtccaactgctacttggacaacgccacctggacatcttgtatggaactgaattctcagccttttaaaatgtttaacctcccaaaccagccactcatcctacttcttcagttttgatgaaatcatcacaattcatcctgatagccaggccagaatctgggcattctgtttgtctcctctttctttcctccacatgctatcatcacaccctatcaattctgcctgcagtactgctcgcctgctggttccctccacagcgtcctctcttctgccactctgccccggcctttgctgttcatcaccaacactgttggcacagtctcctaacgggcctccctcttccagttgccccaactccaacccatcttccatattggccgctggtttaaacttcttaaatgtagggaaaacctgtgtcccctctccttagcaaactttggtaattccccagtaccttacaagtctccccacatcgcctcctcggtgaggtcttttccgatccaacccaaaagttctaccttggcagggcgcattggctcacacctgtaatttcagcactttgggaggccgaggtgggtggatcatgaggtcaggagtttgacatcagcctggccaatatggtgaaaccccatctctactaaaagtacaaaaaaattagctgggtgtggtggtgcacacctgtagtcccagctactcaggaggctgaggcaggagaatcgcttgaacccaggaggcggacgttgcagtgagccgagattgcgcagctgcactccagcctgggtgacacagcaagactccgtctcaaaaaaataaaaaataaaagttctacctctgctaaagcactactcacaataggtctggtggacacatctgttgccccatcaagagtgtggccttctcaatgttggggccatgtctaacttccctttgcatttctagcacagaacatggctagttaagtgagtgtacagttcactcaggagccacaacctggtggaaagtctaagcgcttcatgtggtacctgctacatagtaggtgcttagtaaacattaatagttattaaatgaaagcaaatgtacttcccagatgctgactccatgaggggcacgacgtgaactgggcacctggcgagattttggataatgggattttgcttaaccacatttactccctccctcattcccccatcagatgcttcttcggcattctatttttcatatgcagattcagacagaggacaaggttgaccaaattgggaaaaatagttatcctctagagatcatgacgttttgggcagagaattttcttttgaaatgaaagatgatgcagaagcttggaataagaaactagactgcagtgctactctgtttggaaccatgtgcaaggctcccaccagcccgagcagcagcacctctctgggggaagcccttactggaatgggccactccctgggctggcgctgggcacccaggcaggcattggtaccactagacccctctctaacctcctggaaagcagcagggaatgaggcaaggtagatcctgttctactgtggctgcgggccctgcctagcctggcccatgcttcctaccccatccagcaggccactactggccccagggtcctggggagagaagagggcagctgctcacaccagaaacatctagcatggcttctgggagctgcctctgcactgccactctgtgggagactgtgctggctggggcatgggcttataggccatgaggatggcacaccaggcaaagaagtgttcccaacataggtaggcaggcttctgggcatcagtgggaaggggtggggacacaagaagcccatctctctgtcccgctcctgtgagctaacttagatccccatcaggagggcaagacctacatttgagtcccccaagtaggaaggctgagctccaacaaaggaccattagcttttgttctgaaatgaaacaatgcagaaatatcctcctgagaacagatcctgaatctagagtggaggatgtgttagcaatgagacctgtctccttaaggggcctcaccctaccaaccctttgggcctccctctccagccttcctcaagggcctgaggcagccccagctcccttcccatctatccttatttcacacaagcccttcgcatcttaagatctttcccgctgttcccagtgggacacaaatgggggtaacaacaggttccagaatcctatacagtttttccatgtctggactgtggtctgtggttacagagttcctttgagatacaaactggacgccccattgagcttctgccccatttctattcccaagggaggtgctcacttcctcctatctggcccagtgtgctgagtctgccactgtgaaggctattttcccagcactttggactgaatacaccccgaggcaggggatagacactccttattcccaagtcgaacttttgcaatttgggaccttcaggctgggtgcacacattgctccaaacctctgtgtctttcaagcacatttccctttggtaggtcctctgagatacttggtaactatttgcttcaatctccccatttgcaaaatagaggcaatagccctgtgttgcctaaccagagagaggtgacgtgaacgtaagaggtcaatctgagctcttggtacaacccgagcatcatggtaacgacatggtgttctcccagaaagacttcaaacctggccatgctcttcctgcagctcagagaaggctggctctggactacactaagcctgtgtccatcaaaagaagacagcaaaagaaagatgcgctccaagagaaatcttctagcatggggcttctcgagctttaatgtatacatgatcacctgcagatcttgtaaaaatgcagattctgattcaggaagtctgcaatggaggaattctgtggttctaatgaaatcccaggggatgccaaatggagctggtctctagaaccttcaggatctagaaccttcaggagctcctggatggttttatgatttgacagatgctcccctccgccttcccgcacctcctctctttctcttccctttctccttccttcctccatcaccacatttctatctggtcttacctaaccagggttgagaacattcaagggaagagatacatatcgaagtcctactgtgtgccgagccctggcatggtacgctctgcttacatcctctcctctgtttggagagagacatgtaaacgcggtgagccaagtccaggcttggagaaggctgtgggcaccaactgtggccagatgtgtgggagggagctcaggatgttcgtcaccacatggaaagagcccgtcagctcagaacacaggagaggctgccctttcccgaatccctggacaggcctctgggcactgctaactccagtcccaccatgcacaaaccaacatccctccccatgcccactttctccagtttgctctctccctctggtctaattggtttcttctcacacagttccatagtgcttatggcatcaaagggaagatacgtctccagaggcccatggaccagagtgctggaaaagcttggggcagacaggggtctcaagttgaaaggtaagggtttgaactggggtttaaactgaccccaaaaccagagaaggcaaatgcctggcatggagggtgctgtcatcttttgctgagttgagaacatgctttgtactaaacgtgggtacaacctaagaatcccccacacaactagtggtctactggaatggatgggcaagatgccacctgtttaccacccctgcactgcagcaaatttattataacttgccaccagccactgaaagaaaattgctatatttgttgactcatttgcttggaaagtggccctttattcaacaaaagtatcataagaaaagtggcttagtctcaccctcctacccaattcctgctattcagactggccaggggtcctgcatcttcttcaacattctagctgatgcctagcgtttgtacagtcctttgcagcttgcaaaactcttatttgttccagaaaactaaagcccagagaacctacatggcttgtccaaggccaggcagcttcggtggtgaagcctagcacaggcttgctggctgtgctggaagaagccatccaggagggacatgtcagcatgacacccattatcatcacaaaaactaggtgcagggagagtcctcagagaggctgtatgggcggcagagaagctccacgggcaataatgataatgatcattgtggttgctattcaatgttcagccttgcactttgcacaacatgttataattatctcacttactcattaataacctgtgcagcaggtactattatttccatttaagatgaggacaccaagaatttaacagccaagccacttgcttaaggttaggacttggatcctaatcttcctaactcaaagctgggcttcttagttatacaccatcctcactatggaaaacatcaaaatcagaaacccatcatatggggcaatgagaaaaatcagaagcaatgcaaacccttcaaaccagccaaaggaggacataaggaaaagagaagtatcctttccagcccagtcctgaaatcattttggagcctctgtcttttaaattaagatcccggttgccaaaagctgatgtatgtaaggtgacctaagttgaatggcactttcccggtggtgataaatgcatgttgcctgccaagatgggctgagtatagacgtggattcccatgcccctcggatgctcaagctgtgaactgcaagatggagagtgctgtgtgggtttcaggggtttagagttctaatctggggtgcaccatttactccacactcttggtcaaatttcttcacctctcagaactctttctagagccacagagtgatagagtggggaaggagatcttgtagatcaatgccatcatttgatggatgggaacactgggcttcagagaggggcagggacttgctggttgtcctaggggcagctcaaaggtaggcaggttcctaggaggtctcctcccttacagtttgccccatttcctgctgtgcatggctcccctgtctacaacaaagccatcaccctgcctaggtggcagtgaggctcaggtgagaccctgcctgccccatacaaacacatgtcaggcaccatcagtagctgagcacagagctcttcccaaggggccacagtgcagtgtggctaggcggtacctggtgggcgtggggggctggcgatggggagccatggaacggggtggggcagccgtcctctcatagggcttttgctcaggagactcatcattgcttttcagagcaaatggcattcgttggcttcaaaggcagcttccggcccatctgggtgacactggacactgaggatcacaaagccaaaatcttccaagttgtgcccatccctgtggtgaagaagaagaagttgtgaggacagctgccgcccggtgccacctcgtggtagactatgacggtgactcttggcagcagaccagtgggggatggctgggtcccccagcccctgccagcagctgcctgggaaggccgtgtttcagccctgatgggccaagggaaggctatcagagaccctggtgctgccacctgcccctactcaagtgtctacctggagcccctggggcggtgctggccaatgctggaaacattcactttcctgcagcctcttgggtgcttctctcctatctgtgcctcttcagtgggggtttggggaccatatcaggagacctgggttgtgctgacagcaaagatccactttggcaggagccctgacccagctaggaggtagtctggagggctggtcattcacagatccccatggtcttcagcagacaagtgagggtggtaaatgtaggagaaagagccttggccttaaggaaatctttactcctgtaagcaagagccaacctcacaggattaggagctggggtagaactggctatccttggggaagaggcaagccctgcctctggccgtgtccacctttcaggagactttgagtggcaggtttggacttggactagatgactctcaaaggcccttttagttctgagattccagaaatctgctgcatttcacatggtacctggaacccaacagttcatggatatccactgatatccatgatgctgggtgccccagcgcacacgggatggagaggtgagaactaatgcctagcttgaggggtctgcagtccagtagggcaggcagtcaggtccatgtgcactgcaatgccaggtggagaaatcacagagaggtaaaatggaggccagtgccatttcagaggggaggctcaggaaggcttcttgcttacaggaatgaaggctgggggcattttgctggggggagatgaggcagcctctggaatggctcagggattcagccctccctgccgctgcctgctgaagctggtgactacggggtcgccctttgctcacgtctctctggcccactcatgatggagaagtgtggtcagaggggagcaatgggctttgctgcttatgagcacagaggaattcagtccccaggcagccctgcctctgactccaagagggtgaagtccacagaagtgagctcctgccttagggcctcatttgctcttcatccagggaactgagcacagggggcctccaggagaccctagatgtgctcgtactccctcggcctgggatttcagagctggaaatatagaaaatatctagcccaaagccttcattttaacagatggggaaagtgagcccccaagatgggaaagaaccacacagctaagggagggcctggggagccccaccctagcccttgctgccacaccacattgcctcaacaaccggccccagagtgcccaggcactcctgaggtagcttctggaaatggggacaagtcccctcgaaggaaaggaaatgactagagtagaatgacagctagcagatctcttccctcctgctcccagcgcacacaaacccgccctccccttggtgttggcggtccctgtggccttcactttgttcactacctgtcagcccagcctgggtgcacagtagctgcaactccccattggtgctacctggctctcctgtctctgcagctctacaggtgaggcccagcagagggagtagggctcgccatgtttctggtgagccaatttggctgatcttgggtgtctgaacagctattgggtccaccccagtccctttcagctgctgcttaatgccctgctctctccctggcccaccttatagagagcccaaagagctcctgtaagagggagaactctatctgtggtttataatcttgcacgaggcaccagagtctccctgggtcttgtgatgaactacatttatcccctttcctgccccaaccacaaactctttccttcaaagagggcctgcctggctccctccacccaactgcacccatgagactcggtccaagagtccattccccaggtgggagccaactgtcagggaggtctttcccaccaaacatctttcagctgctgggaggtgaccatagggctctgcttttaaagatatggctgcttcaaaggccagagtcacaggaaggacttcttccagggagattagtggtgatggagaggagagttaaaatgacctcatgtccttcttgtccacggttttgttgagttttcactcttctaatgcaagggtctcacactgtgaaccacttaggatgtgatcactttcaggtggccaggaatgttgaatgtctttggctcagttcatttaaaaaagatatctatttgaaagttctcagagttgtacatatgtttcacagtacaggatctgtacataaaagtttctttcctaaaccattcaccaagagccaatatctaggcattttcttggtagcacaaattttcttattgcttagaaaattgtcctccttgttatttctgtttgtaagacttaagtgagttaggtctttaaggaaagcaacgctcctctgaaatgcttgtcttttttctgttgccgaaatagctggtcctttttcgggagttagatgtatagagtgtttgtatgtaaacatttcttgtaggcatcaccatgaacaaagatatattttctatttatttattatatgtgcacttcaagaagtcactgtcagagaaataaagaattgtcttaaatgtcatgattggagatgtcctttgcattgcttggaaggggtgtacctagagccaaggaaattggctctggtttggaaaaattttgctgttattatagtaaacatacaaaggatgtcatcatc

SEQ ID NO: 83 - DNA, 3718 bp, Homo sapiens
aggcagggacccgcagctcagctacagcacagatcaggtgaggagcacaccaaggagtgatttttaaaacttactctgttttctctttcccaacaagattatcatttcctttaaaaaaaatagttatcctggggcatacagccataccattctgaaggtgtcttatctcctctgatctagagaggtaagcagggtcgggcctggtagtacttggatgggagaacacctgggaataccaggtgctaaaggctttaagaataaaaaataatgatcctgctttgtgtttatcccatgttgagttctgtgcggggcagagggaacacacggtaaatgcgttatggggaattataggctacttgagggagtgacagtctggtggtaactcctgccttcctccatcagtgccacgttggcatcctcttatgcagtcaggcttcagggctgatgggttcagaaccgagggcttctggctctgagtgaggtcctgctgcaaggtttcctagatgagccactgagactctaataagatccagtggaaataaccaggctctcgtcggaatataagtcccaagggaagctgtgccagtcttgtgggcgactgcctgacttctcctttcatttcagcaccatgaagcttctcacgggcctggttttctgctccttggtcctgggtgtcagcagccgaagcttcttttcgttccttggcgaggcttttgatggtaaggcttcagaaggtttgcaggatttctgaagagaaacatcaccctggacctgataaactggggaaaatgatgctttcggaaggctgcttttgaaccacagagttgctagtgtctgcgttgctgaggcctgccaggaactagggtttgctgggttgcctgtctcgagtctttcagagctgctgggaatatcccctttccccgtagtgcagcttctcaggatgtgttaagtggatggatcacatttcagaagccgctgcaaggtgtatcaaaaacacatctcctgagccgtaagggacggggcatccagtaacaacgcacacggggtatttttgggcttccttaagatttgagccgctgccttaggttgtgctgcccaatgtgcctggggagctgctaaacagattagagagtcgaggattgttgtcagttactcagagaaagaacaatcatcctttccaggagcacctgagctgtttgttttgcgtagaagatgcaaaataaggcctgcaatgggtataaaatgtccctcagcataaatcgcataggagtatgactaaggctgttgactcttctgtcttctttctccttcctccttcgatttcctagttggataatgtacagggctctttagcctcgctctgtcaggggctcccttcctggtttgttctgtttccattcttccttctccagccttcttgacaagagctgggaactaacgtgcctcaagcccccacaaggaccacagcattttctcatttagtttcagaatgactctgtgacgcaatcttcctctcttggaaggtgagaaagctgatcttggaaggtgagaaagctgagacttagagcagctgaagccaatgcccagggacttactgccagtcagcaggtggcagggcagaggtttgagcccggctgtgcttgaggtcagggctcttgccaggtagacgcatcactgaccacctcctagaggttgatggttatgaatctcaggcacaccttggcatcacctgaaatacccatgccttcaactccccagcagagtctgcagaaactggcctggggtgtggcctgggcactgggactttcagtttctctctgggtgattagaaagtgcagccaaggctcacgcctgtaattccagcactttgggaggccaaggtggatgaatcacttgaggtcatgagttccggagcagcctggccaacatggtgaaaccccgtctctactaaaaatactaaaatgtagccaggcgtggtggcaggcacctgtaatcccagctactcaggaggctgaagcacgagaatcacttgaacccgagaagcagaggttgcagtgactagagatcgcaccagtgtcctccaacctgggtgacagagcgagactccatctaaaaaaaatgaaaaagaaagtgcagccaaggcagagcaccactgccctattgcttcctcaagcaacccacagcatcagtacagcctactaagaaagtatttagggacttttatgctcctaacagtcactggaactcacgtcacaatgacgtgtattccatttgcaagaatatatactttaggtcggggtgcggtggctcacgcctgtaatcccagcactttgggaggccaaggcagggggatcacgaggtcaggagttcgagaccagcctgaccaacatggtgaaatccccgtctctactaaaaatacaaaaattagccaggcgtgatggcgcatgcctgtaatctcagctactcaggaggctgaggcagaagaatctcttgaacctgggaggtggaggttgcgatgagctgagatagcaccactgcactccagcctgggcgacagagcaagactctgtctaaaaaaaaaaaaaaaaaaaaaaaaaaaaaaaagaatataaactttagtagtcagggcagaagtactctgtgtctgccacctttctcagcatcagtattccatgtcactacctcattcatacacactcctggatcttatcataggcagcttcattctatagcagtggctcttcaccagggcacttgaagaagccaactaggataaaggaatgtgcttctcaacccatggtatccaaggctgctatgatcacaggctgaaagcttgaagtcagtggaagatttgtccttcctcattcccctctaaggtgttgttggagtctttatgttctcctgatgtcccttctgcctttcctttcctttccaggggctcgggacatgtggagagcctactctgacatgagagaagccaattacatcggctcagacaaatacttccatgctcgggggaactatgatgctgccaaaaggggacctgggggtgcctgggctgcagaagtgatcacgtaactggagctcctgggacgttagggctgggtgagcagagcttgcctgccttggacagtcaggagggagacgagctccttgtggagaagttagaggctgcggcccctcctcctcttgccctctctctgcctctgtgctcagtgtgaggtctgagtggatggtaggagtgagtgattcctcatcctccctctctgggtgctgttcatccagcctaggggtgcccagcctggctgaatggggtggtgcccagtgttttcatccctccttccttggcctttctgggctcctctctgagccctcccttggaacagggagaatgggagggtgggctattgctcactggcctgattattaatctccttcttgcctgccttgattacagcgatgccagagagaatatccagagattctttggccatggtgcggaggactcgctggctgatcaggctgccaatgaatggggcaggagtggcaaagaccccaatcacttccgacctgctggcctgcctgagaaatactgagcttcctcttcactctgctctcaggagatctggctgtgaggccctcagggcagggatacaaagcggggagagggtacacaatgggtatctaataaatacttaagaggtggaatttgtggaaa

SEQ ID NO: 84 - DNA, 26781 bp, Homo sapiens
acactccaccggaagctccgggcctggccgccggtaggcggtggcggaggcggcgccgaggttggctgccctacacccctgccccgggaccgcagggcggctccccggcccccttcctcgccccgaactccccgctccagctcccgcttgctgaggcggggactcctcgggtgcagccggggacctggcacctcggctgcagagaccgccccggactcaactgcccccagcccagccgcgggcgccccggccccgcaggggctcattcctctttccgcgggcaccggcgctgcctggctcccagcgctgccctcgcaactggatatgtggaggtggcgacgcgacactcccccgccctcgggcgggctcaccgacctggctgggggctcagcctgcagagccgggcggcgggggctgtgctggcgccggcaggcgcgaggaatcacagagcggggcgcccagcctcatcatggggcggcccacggagacttcccgtgggagtggggtctggtgcaggggcgccccaaaggacgagtgggagatggggacacgcggcgcagagagactcctcgtggatggagccgatggaggcccagtgtagaagagaaaggggtcaaggagacggataaggagccaccagagacgcggggggaattccccgcagaggatgcgggaagccggggaaaggaagggattccggaaggaagggctgagagccgggtcaggtgctggcaggagggctggttggatagaaactggggcgggcccagggcatttggcgtccccgacatgcgtatacacttggagagatgattccctggagatccaagtgcctgtatagacaatcttttctagaagttctaccgttaggtgaggcgagagtagatgtagaaattggagacgagaataaagagtgttttaaaagcgtgcgtggttacaggactggctctgggttcaggggtccccactcactagctgtgagaccttgaacaagtcgcttagcctctctgtgcctcagttttctcatctgtaaggtggggatgatgatggcaatacctgcttcacagagtgaaaattagatgagatgatgtctgtaaaattacgtaagacggtacccaaaagtagtactatttttcccttttcttattagagcaggttgcgcacgttttgatgtccgtgggaatgagcaggtagagagggtggtattgaggccggaggggagagaagggacccacagatggggagagaagtcttgggtgcctgttttatcccaaaccaggggaaggagggaacaggtagggctggctgcaggaaagcttgcaggtatggggtacacagttaaaagggagtgtcttctgatagtcttgatgcaggcctggaggtcgtttgttatgggggtggaggtcctgatgtacattgtggcggtaagatgccgtgctgtctttgccaccagcctgtggcagccctggtgttacaccagggcaggtgggcagtttaatgtatctcaggccagatgacctgccctgcccacctgttgaggctccagtagatagacgtgaaagcacagtataagcataatgcaccactttaatccttttctctgaggagctggaaggcctgtagtcaccatctgagccaaatgtcattcaagtacttcacttgggttacacaccacactttgacccactatctcatttagtcatcacaacaaatgggtgaaataggtattattgtcccattttacagatgcagaatctgagtttcagggaagttaaggactttgtcccagggcccacagttagtaagcagtggacccaggatttcaactcagctctgtctgacctcaaaacccatgatctgaaaccactgtgaaagtttgcaaaacctctgtagcagccaagcaggatggaaagatgtgtagggattgtcttctccatttgatagatgagacaagagctgggtactctgatctccatcccaagcacacagagcttggggccccacagccctggtgtgaatcccactccactaccagaggctgtgtgcctttggaccaggcatcttgcttctctgaccctatatacagctgcagaagaattccttgcaggttgctgtaaggatttggagggaaactgttgcccagcacacagtacacattctgggagccatcgtttccccagtgcacttttcctgcaaatgtggatctacatcccacttggatgctgagaccagctgctgtgatcttgcatttgtttagcgctttgttctccttgaggcagtaaagtggtggcacctgaccggagcatgtagccacctatgacttcctgagtggggtggtgtggggagggccctgaggagtctgtggtcctaggccttggatttcatcagggctttcctgctccttctggttgcctcagtcccaggcaagatagggtcccagaatcttacagcccagaggccacctgttgcaacttcttttttacagatggagtcatcagaacccactgtgaggaagtgacttctccttgaggtcacccagacactccaaacagagcagagcaaaagcgcctagaacttgaaattttggacctgtctccaacaccctggggatttccaccaggaaggtgagcacccccactgagaattccaggctgctcagaggtgccagggaacacagaccagggaccagctgtggccccctcctccgatgtgcccagggaagtgggggaagccagcggcagcctgcgattctcaaccaggggaactctcactgtgctttctgagagtctgtgacacgggtcattttctctgacttgctctcttgctttttctcactctaaaaaaaaaaaaaaatgactggacactcctaaagccttcagtcaccatccaggggatttttatcgccacaaagggtaattcctgctccatccctgctgtgactcagctgtgacgttgaaccacacaagccagagagaagaagataaagtcatcagagctcctactcaccagagagtgaggcccaggccaggactccacaaggctggtcccctgccctggagcaacttaaacaggccctctggccagcctggaaccctgagatggcctccagctcaggcagcagtcctcgcccggcccctgatgagaatgagtttccctttgggtgccctcccaccgtctgccaggacccaaaggagcccagggctctctgctgtgcaggctgtctctctgagaacccgaggtgaggtgatggaggagcggagggtgggcagaaagtgggtgccagggagggacccctgatgggaggtgaggggcagaggagcctgtgacttcaggcggtgacttttcttctctgggcctcagtttccacacccttttctcacactccctgacactgcccctctggctgtggtggaaggagaggaagccacagaaaggcatcagctcccacaggggaaagccatccacaccgaggagagcctcgaggctgtgaggccactgtctcactgtgtggtctggtgctctgctaatgtccctaagccgcagctcgcttgtctgtaaagctgttttctgtgtcatagaattgttaatgaagcccaatgaataataatcacaaaagtccttataataacaaatataaacctcttggtgaatgacaaactgttagacgaatatctctccttccacagcattgctcatcacctcagaccgtttgctgggaacccttttggaggggacaaagagatcgatatatatttgtgtatttaatgatacttaaaatattaacaacccagaaaggcatgatatcagtactattgtggacatccctctttaagcaattatgcacctactgtgtgccaaatgctctgcccttgggtcctcagcacaacttagaggggtggatactattatgatcctattttacaaatgagaacactgaggcctaacagattaggtcagctttggtcagtttcctggcaaatatgcccttaaactatctcatgtgatgaccttttgtttgcggttttacagcttaagaaggtggcaaagctgaatcaggcaagtgagaagttcaaacatgacgacaaaggaggaggctgtgagaatagcgaggagaggctgtggccgtggaaaggccagccaggaggtggaggagcagaggttcactggttttaccatcaagcggattgtcagggttcagctcaggctctggtagtgggtctcctggtttcccctctccctccttccaaaacctggcagaggagggagctgattggaagttggagggctgaggcctgaggcctaagtcctgaagagcttctactcagctctgctcctgactcactctaccttgaccaatccacatgccctctggggcctcattccctcacttgtaaaatagactatctcggtagcggtagcaggtcagagacaccaggagctttgtaaaaacacagttgctggccaggcgcagtggctcatgcctgtaatcccagcactttggcaggccgaggcaggaggatcacttgaggtcaggagtttgagaccagcctggccaacaaggtgaaacctcatctctactaaaaatacaagaattagctgggtgtggtggtgtgcacctgtaatcccagctacttgggaggctaaggcatgagaatcacttgaacctgggaggcagaggttgcagtgagctgagatcgcaccactgcactccagcctgggctacagagtaagaccctgtctcaaaaaaagaaaaacccccaaaaaacagacaaaaaacccacgggtacccaggtgttacccattagaatctgacacccattcctgattaagaacctctaggacagatgttctctgaggccctttcttgttctaataggccatgatcctctgtaattactaaacatataagaccaaaaccaaatggaggaccaaatgagaagagcaaatatagtcacatgtcagcaatcttttgcctaaacccctgagatcagatgtgttttgtaattcagaattttttttagaaaagcaaatcagggcatcatgtaattgtggcagggaatgcggcagtgccctgtaatcaagcacattaatgtttctgcaatgaaacatgtatatattcacactaagtggggcaagtaagggctataatagcttccggtcagtgcagtcacggcaggtttggcagcccaggaagctcactgcaaactaccaaaaaatgtgggatactcggcagttttgcgatttaggaactgtggctctgggattgtggacgtacatgatcaccaccctgctgatagttgaggcttctggagctgtcaggagagtggatggtgcagggagctgtagtgcctctctccaaggctttgtccatgtttccccaggaatggcgaggatcagatctgccccaaatgcagaggggaagacctccagtctataagcccaggaagccgtcttcgaactcaggagaaggtacgttggcacatcacagaaaggcatttgtccgttgtcttgatttttccaggttgaagccaagtagacagctgcccactccacccctggcaggcacctcccaactagtcctgagtccagactgaatttgctttataaggaataaggagactgatgttcacagtggtgaagtgtcttgcctaaagctacctggcaatagacttagagtgagaacagtccagaccaggggtccacaaactacggttcatgggccacattctggcccaccacctaagcaacgagctaagagtggtttttatattttcaaatggttgaaaaaatcagaagaatgataggccatgcataatgacctgtaattctcgaggctgtgaggccactctctcactgtgtggcctgctgcactgctaatgttctcaagccacagcttgcttgtctgtaaaactgttttctgcatcacagaattgttatgagccccaatcaataataatcaaaaaagttcttataataacaaatataaaccccttggtaaatgacaaacatgcctgtaattctgaagtgttagaattcaaattacatagaattacatgcctgtaattctaacactttgggaggccgaggtgggcggagagcttgagcccaggagtttgatactagcctgggcaacatgatgaaaccacatgtttacaaaaaatataaaaactaacctggcatggtggcacatgcctgtagtcccagttagtctggaggctgaggtaggagagtcgcctgagcctggggaggtcgaggctgcagtgaaccatgatcgtgccactacactccagcctgggtagcagaatgagaccctgtctcaaaaaaacaaaaaaagatattttgggacacatgaaaattatataaaattgagtacttgcaacaaagacttcatagcccaaaatatttactatccacccctttacataaaaaaggttagcaaactcctcatctagatggttctgtctgcctctgtttgcctttaggtggggagagaccattatcagctcacgtcctgagctctgtcaaacggtgcttctaggaataagagacacatttggaagtgtgataggccagagagacattttcaggagctacaatttagaaccctggccctcccaagctggaaggaccctcataggttacatgtcctgctcagaggttcccacatgctatccagaactgatccattcccaccagctcatgacaaaatgataaaaataaggcaattctataaatcagtttatgtaaactaaattctttccatttataaaaccaaacttttactctgagattgcgtctgtcctatgcatgtctttatataaatgaaaggatgtaatcgtagatgatagtttttggcaaagcctttgctaagtaaaattaaaaagatgacaatctctttgttaatctctcaatttaaaaaaaaacacactcgtattggtccacgaatccaaacaggcaggagtcactgctcaaaatcaaatcctcttgtttacacacggggccctgagacctgcagaggagtctcgttgctcagccgccctctctacctccactgggaagtgcctggctcctttcagccaaagccctcttcttgcagcaaactgtggcccagggatcaggagcctgatgtccaggggtggttctgcataattctctgcttggctagcagcaattcccaggccctgtttctgtatctgtaaaatgaggatattaagtcagctctgcaaggcctttccaggatctgtgatgtccagaccgtgatagcagtgctggcagggcagctatccccctaccgctggaccagaggcaggcgagtgtccacacctccttctcctttctctgagctggtccctctcattcagagagttcaggggaatttcctgtcccacccagagctggttttgagcactctcccatctgcttctcagcaacctctccatcggcaggccctcagagagtaagagtaaggaccaaatgcatgttcttggaactttacactctgcaacgtggtaagagttaatatgatatgctgctccgtggagtaactccctgagcctcactgtttggctcttggtggatcggctgtgagacacaagcagaccctcaactctgtgagccactatgcctcacttgcaaaaggcccttacctgcttgaatgctctaggactgttgtttttagcttgttttattctttcctcttaacaaaattaatacacatttattgtgtaaatcttagatcacatagatattttaatatctcctaatccaatggctttttttcatctttttcaatcagatgaaagtaaaagcattctgatggagggggatcctggagccccgacctgttaattgccccatttctttctcctatccgagcccctaagaggttctggggactcctagggccctgcagagcacagtttgaaacttgctgccttaagccaagtgaaggcactataattcatggtagaattataggcaccctaacaggctacaggatgggagaggaagctgcctgtatttgggagcaaagaagccttctttaatgcgggcagacctctgagaggcatcagccccctcccctccctgctggcttccccacctcgtggagtcatggacttctggtgaaaagctggggtggggaggggcggtaagtcatggtctgatcacctacacaaagccacataggggaaggaccagggactcctctgacttttgccccagtgggaactttgggggacttttgaccaaaggaaagtggctgatgataagtcaccactttgcatgtgtggtaattcctaagtttgcctgcacatctggggcaacctgggaaatggaggcagggtggagggctgaggaccagccctccttgcaaacacttcccatgccatctgcttatcagtttgtccccagcctgtgacttcattagatgattatctcccaaagaagtgcccagagccatggactgattacctaatgtaagaagcagatattagaggattaatgttgacctagttagagacttgatacttgcctggcgtgatcttcctgtagaagtgacagtgaaggaggggatgccagggggctggagataatcttcagtcctgtctgctgaggatcagcaaatgggattgtttctcccaccccctccccctgaggcccattcaagaaggtcaaaagcaagctgacaactgatgccagtagctcacagtaaagccttaatttgtctagactcagaaagtgacaagggtttaagctgtctagtccaatttctgttctgtactggattcatgctacgtggctccatgtccttccaatggcagagaggtcattactccatgaaacaaccacacctaccctggggagctctgagtgatgcaacattctcctctttctttgtactgagctgaagtctgtctgtctcccttgaggtcacaaaaggcaacttagcctcctatccctggagtcagtcctgcctccatggaaagacactgagcagtctttccccagtctctgtgcatttggggtaaatgcgcttctgtttatctgtgttccttgaagtgtgatacctgggaataaacccccaaaccttacacttctgagcttgacagtgttcatctgtaatcgccccgatcctgtgacatcctgtgtggtgggtggcggtgatagccctattttaccaataggtaatattttgaggctccatgaggaggtgtgcctggaccaaagtcacacagcaagtgggaggcaaagccaggctctaacccatggctcctgagctggtggcatcttctctatgctgcctctacacaaggaatcctcccctaaatgtttcatacctgcttaaataacacagtcaggctttagtgcaggagtccaccaagtgctatgggaaaaacaggaatgggcaagactatgttcaaccaggagaatcaggcagggcttcctggaggaggtggcggtcgagctgagcagaggctgacagagagtaaaccggcccagttacagaggagggcaggaacgggcggacagtggcagactgaccaagctccccatgtgactgtagagcaccccctcagcaccagctgagacctgagtcacagcagcccctccgggcatccctgacctcagcccagtgtgggggtaggcagtgcctggcctgctcagatcctctttgttctgtgcaggggctgcagaggtggcactcatgctcccagcaccctcttaacagtcacattcccggaggccccaggtctcagaatggggccccccgctagggcccactgtgaccccaccacaaagggcctgggtagccagggtggccggaaacaccacacacgcagagactcctcagacccagacagaagaacgagtgttccctcagggctgggaatctgttttctctgtttctgtctcctcctcggaggaaattccactgcacactttatttttagcaatttgcaagcagtgaggccactcacacaggggccacttgtgacaccagacagggttggcccaggacagatcctctgttcttctcctgcaatgcagtctgattcctgattccctctcctgtcccctcggtccctggcctttgagtgaggccaccccaggcaaggacactatggtggggaggacggagcctgcacacggactccaggctcctgggctcccctcgcctgccccgttgcctcctggaagtcactgatcgcccctgggcttcggcttctccacctacccgagggaagcagaacctcagagccccaacctccccctcatggctgtgaggatctgatgggacagtgtctacatgagtgccaggagagcagcaagcccatgcaggggctcacaactgtgagagagaatgcacaggtgtgcccagctcctctgctcacaagctcagcatgaccttaagccattccctctgtttctgcctgtgttaaggtgactctaatacagccccacctgcctcagatgattgtcacagggatcctatgggacaacattcaaacatattttggtcctgttcatttaggaatgttcctcaccaccttgaggaaatccagtgggaaaatggagttttagagagttcattgttaaagagtttgtgatgtgaggattaaatgagatacatgtatatgacagccactgagggattgggactgggagatgtcccggggcagtgcttaatccacaggaataagaatactaattagtagtaatactagtagtattactactattagtattattagtgttattagtagcagtagtattcaacaagtattcagtagtagtatggaataatttcaataaatatgagccattattactattaatttattattagtaataatggctcatatttattgaacactgtgttaggcagaataatgtcctccaaagatgtccacatgtgaatccccaggacctgtgagtatgtgacctcacatggctctatgcatttgccagggctgccataacaaagtgcacagactgggtggtgtaaacaacagaaatgtatttcctcgcagttctggaggccagaagttcaaggcacggtattggcgagttggtttcctccaaggcctctctctttgccttgacatggctgtcccctccctatgtcttcatgtggtccttcttcaaatttccccttcctaaaaggataccagtcacattgcattagggcccacccccaatgacctcattttaatttaattagctctttaaaggccctgtctccatattctgagatactggtggttaggacttcaacatctgatttgggtgggggttgctgagcccataacaatggcaaaacagactctgcagacacgattaaatgaaggattctgagatggggaggtgaccttggattatccaggaggcccaagtgtcctcagaagagggagatgagggtcagagagaaggggagatgctccactgctggctttgaagatggaggaagggaccacaagccaaggagtgcaggcagccctgagaagctggggaagggaggaagccatcctccccttgggcctccaggagcaacgcagtcctgctgacatttccatgttaggacccctggcctccagaactgtacgataataaagctgtgttgttttaagctgttaagtttgtggtattttgttacagcagcaatgggtaactaataccagtgcttacatgtattatctcatttaatcctcacaataaccctgtaagggggtattattattatccccattttgcagatgaggaaactgcagaacagaggagttagtaactatcccagagccacaaagctagtatgtgaagtgacagaaacaagctctgaaccccaaaaggctggctccagaggccacatcctgaactcccgtgcactctaaggaatgaataatgatgatggagaagcctctgaaagcctctcaagtcacccctgcccctttctccagcaactgttcaaggctcatcacagtccacatctgtacacgcatcacagaaggatgtccctacatctgaatagcatttcactccctaaaacagacatttgctgttcacacaacgccaggacagctccgctgctgaaagacacatcccctccacctgcggggtgatgtctggaatttcactcttagcttgatcattttcatgttcttatctcttttatgactctcccaccaagctttgacccttagaaccacagactattggaatcatggacctgtggggaggggtgggacctgaaaggctcccccaggtatattcaccaaggagccaggtctacacatagcatcttccctccactgttctcacatgtcaaaagctacatgtttggggaggtttcatcaccacagacttcccgaagccagcacggtctccctgccaaggccgccctctgcctgccttccatagaacatctgttttctattatttattgggaacaacttgtccctgaagccctgggcagttggtgggtgggggtgggggcagggtggcctttgctgggctgtgttctgtgtctcaacccaactgtactcattaagcccacagctctctggttatgttacttttaaagaataataactagtgtgactttttgtatttgctcagtccgaaagacctctgtcctctcctgctttcgtccaaatcccctttcacgtggttccatgagattattctctcaaaaaaaaataaataaataacaaagcgcttatagaatcaagattttatttatatgccataaaactcactcattttaagtgtacagtttgatgaatataaataatcatgtaaccgccactacagtcaaatggcaaatgtttctgcacgggataaagctgctttgtgtccctgcatagtcagtcccctccccacccacagctccaggaggcaaccactgatctacttcctgtcactctagttttgcctttgctagaagctcgtaagaatggaaacaggtagtatgtagtctttggtgtttgacttctttcacttagcataatgtttttgaggttcatccatgttattatttatgctggtatttaattccatttggttgttctgtagtatatatagaccaatttgtttacccactcaccagctgatgacacatttgggttgctttgaacaaagccgccatgaacattcacatacacacctttgtgcagacatatgttttactttctcttaggtaaattcctaggagtgaaatgtgtggattgtatggtaactttataagtatggtttataagtaaattattttataagtatgatttaactttataagatactttcatagattgtatctgttcattattcatttattttttttaagagagacaaggtctttctctgctacccaggctggagtacagtgatgtgatcatagctcagtgcagccttgaacccctgggctcaagcgatcctcccacctcagcctcccaagtagctgggactataggtgtacgccaccaagactgctaattaaaaaatttttttaagtagagatgaggtctcattatgttgcccaggctgtcttgaactcctggcctcaagtaatcctcttgcctcagcctcccaaagtgttgagcttacaggtgttgagccactgagcctggctgtgcccattttttattaggtcatttgtctcttattaggttgtaagagttctctatatattctggatacaagcctttatgaagatacagtcatgtgccatgtagcagtcaacaccagaccacatatacaacgatggtcccagaagagtatagtactgtattcttactgtaccttttctatgtttagatatatttagatacacacgtacttacagtgttaacaattgcctacagtattcagtatggtcacgtgctgtacaggtttgtagcctaggggcaatacgctgtcacagagtttcggtgtgtagcagggtataccatccaggtttgtgtaaatacatcctatgatgttcacacaatgatgacacatttctcagaatgtattcctgttgcatgactgtatatgttggaaaaacttttttcccatctctcctgggctgactcctgttaagaggtagtgatgtgcgtgggaggggccctgtggctgtgctgcctcccagctcggcctccttgggcaaatcccttcccctctgtgagcctcagttttttcatcagtaaaataggaataaaaacccaccctctcttccccaccatgctgtaaggagccctaggaagaattatggccatgaaagcatttggtaaatgcttcagacctaaataggctaacagtggggtcaaattgctattataatagcactgagaccctcctgtatcccttccctcaggctggatgttatctggaagggaaagttgtgcggagtggacacacctcagtcaaggatagatggccaaggagggatgcagatgggaattgtgagcccaagattccccatgaacttcaggaggagggaggcatttactcatgcagtcagtgtgttctgagtgtctcagctgtgccaggcactgccctcagcactgggaacacagccatggccctcacagagcccccccgaccagtcggggcaaccagagagtgagtgatgattacggagctgtgtggactgtgccctgacaggagaaatagcagtgctgcccaggatcacagtaagggcccaggtcctgttttgaaggaaggtcatggaagggtggaagcttaaagggtggaaaggagatagccaaagggaacagcagtgtgcaaagtcatgtggcccaagccatctcctgccctggtggatcctggtgcattgaagagagccccagggtagccacagggatcgctataacattcagtgatgtgattattatttccaggctcaccccgaggtggctgaggctggaattgggtgcccctttgcaggtgtcggctgctccttcaaggtaagcatctgagtgtgagaaaggagatctatccactatggttccagacctccaggtctccccactgcagcccctccatgattttcccgtaacatcagtccactcatctggatgtcctttgtactaatgactttcccaagcatcagagcctactattaagtcatcacagtactcagggaagttcttcctaatgtcttacctaagcataggcagaacatcactaaaatgacccccacccccaatgcccctctccatggtcctgaatcatccttgcactccagggcagggcagaattagaagctgcaatgcatgtggctcatcgtgggcatgtctgatgccagggtcttcctctgaatccctcccactgtacagaaagccactcctttttgctgggtgaatgaataatccttggtgacctttgatagcagggcactccactgctcccctgtcctcactccacctctgttttcactgatcagccccactctcttgtcagggaagcccacagtctgtgcaagagcatgaggtcacctcccagacctcccacctaaacctgctgttggggttcatgaaacagtggaaggcccggctgggctgtggcctggagtctgggcccatggccctggagcagaacctgtcagacctgcagctgcaggcagccgtggaagtggcgggggacctggaggtcgattgctaccgggcaccctgctccgagagccaggaggagctggccctgcagcacttcatgaaggagaagcttctggctgagctggaggggaagctgcgtgtgtttgagaacattgttgctgtcctcaacaaggaggtggaggcctcccacctggccctggccacctctatccaccagagccagctggaccgtgagcgcatcctgagcttggagcagagggtgagtgtgggaggcaggtttgccttcaagcccggctgagccccatcctgtctccagagcggcagacaggcttcctcctaatcattcatcctgcttacagcagtcactccatcaaaacgtatctcccctttatcccacacccttccaggaagagcgctgagttagaagctgtagtcaaggtcataacctcccatccagtgcttcggttcctttgcttgaacttttgtgataagacaccacctccctgagcagctcattccagtgcaggacatattccactcttagcaagttcttccttgtactaagctaaaatcagcctgtctcttccctgcattgttcctggccctgcccctcagagcccacaagacaaatccaccttctagtccccatgacagcccttcagggatggagggtcagattctgtcctacctgagtgcttcccttttcaggctaaaagccccagcgccttcacgtcttcctcagagcatgctgcttcacattgccatcctacgctctggctcagtctccaaagaattctgtacgcttggagtatggtaccaggctgactccagataatccacttggccacagttcttggtccaacagggctgtcttctcccttattctagagcttatacttttcttttctttctttctttttttttttcctttgagacagagtattgctctgtcgcccaggctggagtgcagtggcgtgatcttggctcactgcaacctccactcccaggttcaagcgattctcctgcctcagcttcctgagtagctgggattacaggcgtgtgccaccacacccagctaaattttttgtatttttagtagagatggggtttcaccatgttggtcaggctggtctcgatctcctgacctcgtgatccacctgcctcggcctcccaaagtgctgggattacaggcataagccaccgcgcctggcctatacttttcttaatgtagccaatgaccattctaatgttgcttcttttgcagtaacattacatcattgtctcatattgagttaggcctggattttagttcctgcttcaccattaccattatctgcctcaccattcgcaattaccattacagcaggtgatcagagccacctgccgtgtgggtctgagcaagtcactttccctctcaggaccttccccatcagtaaaattaacgattaaattttctttaaggatgctcacttccattcatggcttccctacctgagcacacccaagaataaatttatattctttccattttattggggaaagctattagaagggccaggcgctgagttggagtggctgaggctttagcctttatttatgtaactcttgctccagttaaaaggcagcctccctgaaagccacaattataccttcatttcacccacaaacttcccagctctacttttacataccaggtactatgcaaggcatggacacaaagacacaatgagcatgggcccagctttcggtggaggagaccatctggtagggaagccagaaaaatatgtctcatgaaatcattgtaagggctctgtaagaacatattgaaagagagcagctaagctaggacagtggttgaaggcttcccagatgaggggccatatgagctggattcctggtggataaggaaaaggaaggccaggcagggggcagcacattcagatgcagacgcacacctgagtgaggcgtggtcagcaaaacacatctggggcagatcaatctccacatcccgccattcccatcccatccccaagccgggttctggtgttcctggctgaacagtcttccctacaggtggtggagcttcagcagaccctggcccagaaagaccaggccctgggcaagctggagcagagcttgcgcctcatggaggaggcctccttcgatggcactttcctgtggaagatcaccaatgtcaccaggcggtgccatgagtcggcctgtggcaggaccgtcagcctcttctccccaggtaacacctcccaggggcacagagacctgcctggggaaacaggccccacaggacccaggaagcaagcagtgaaaactgccagctctgtgacagacacgctgtgtccagtttaggccagtgcccattcaggccactcaccatgggcaggaaccatgctgggatcttcaggttggtgggtgaaccgtgctctgccctgtggctctcagccacacatagcggtggccccagctgactgacattcaggccctttctcctccctgaatgtcagtcccattctgcaaataggaatcaaaactgttacccacttcatgggtttgggatgtgaaggaaagtgtgctgtgggccacagtatgtgcagatgagatggatgtggatgatgattttcacaagtgaacaccgtggcctcagagagccgacagtctgaaataagattagagaactgagtaagacacatgcacttgtgtatgattgcaggtagcatatgtgaatgagtgtcttactcagttcttactcatttctggggcccctgggcttggcacaatgtcttgcataaagtaattacttggcaagtgtttctcttaactaaatgatatctgttaatataacagtgcatatatttgtgcaaaaaatgaggcagcagactgcgtgcagtggctcatgtctataatcctaacactttgggaggctgaggcaagaggatcatttgaggccaggagttcaagaccagcctgggcaacgtaacaagatcccatctccacaaaattttttttaaattagccaggcatggtggcctgcacctgtggtcctagctacttgagaggctgagatgggaggatggcttaaggagtttgagtctgcagtgagctatgatggtgccactgaactccagtccaggcaacaaagcaagaccctctcaaaaaacaatttttttttaacgaggcagcggagtgtgtcacaatcccagagcagggctgggactcctttcctgcaggagtagcgctcatcccactgtgttgggacagctctcttcatggggtggcctcgagccctacttgtagacctttttccctcaattcttttcaaagagggaaaaagcaagcagtacctcgtgcttcctgttctaccaaaacgtaatgggcaaagatgagtcagactgccagcctgtccctcctccaccctcttcctgcctgcccccaattcatgtccccagtcagcctctcccagaagggcgctctgccagaggacatgctctcatgggatggcccctttagctgcccagggggtttctgtgcatgttcaccaggtatgattcagccctcaaagggttttgccacctgagaatggctggcagaactgcgagtcaccccatgtacccccagcctccaggggaccccagccagttggcatagggcagaactgtgagtcaccccatgtaccctcagcctccaggggaccccagccagttggcatagggcagcagaaagaaactgctgctgggaggcaggaagcctggcccctcattcttgctgggtccccaacataccgtgagatggtgaccagccactttgtttttctcagcttggtttccagactgtaaaacataggttggttagatcagtggttctcagagtgtggtcctaggaccagtggcattggcaacccctgcaaacttgctggaagtgccaactctcagttctcaccccagggtcactgagtgagaaactctgagggtggggcccggcagtgtatgacttggatggccagctgacaaacactaagctagatgacccccaagagcccattcctgtctgacaccctactcgagaagaatgctgggttctaaccccatctttcatggttttgagccgctgaccttgggcatgcctgaccactggatcccagtcccacatctgcaaagtccagcacttcccaactgcctctggcttctgcgtttcagccttctacactgccaagtatggctacaagttgtgcctgcggctgtacctgaatggagatggcactggaaagagaacccatctgtcgctcttcatcgtgatcatgagaggggagtatgatgcgctgctgccgtggcccttccggaacaaggtatgggtgtgaaggtgatgggggtaaggtggggagcatggaagcctgagtcctagtcctggtttggcaatgaattggccatgtgacctggcaagtcccccaccctctctgtgttatcagtttccctttttataaaacaatcagatctagtaactagggctccctccagctccatgagtccaggagctaaaatgtctggaatcttcctgaaggttatatagaaataaaattcatggccaggtgcagtgccccacacctgtaatcccagcactttgggagactgaggtgggaggattgcttgagctcaggagtttgagacagcctgggcaacatggcaagacttcatctctgctaaaaataaaaaccatctggccaggcatggtggctcaagcctgtaatctcaacaatttgggaggccgaggcgggcggatcacttgagaccaggagtttgagaccagcctggccaacatggtgagaccccgtctctactaaaaataaaaaaattagctgggtgtggtggcatgcacctgtaatcccagctactggggaggctgaggcaggagaatcgctagaacctgggaggcggaggttgcagttagccaagatagcgccactgcactccagcctgggtgacagagcgagactccatctcagaaaaaaaaaagaatgtgggaactaaaattttcatttttaatgtaatccccaagattttctccaagaaataaattgttgttttgtattttgtaacttaaaagcagctattggtaaatttctgagatatagcaggagaccaaaacatgtttggaaagagaataaatatatgaagagagactggttgttttattttcaatgtattgaatatattagattacaatttattttctgagtggatgtgattaaatattcagacgtttagtgtatgattaacagtgagatagagatttctttggagttattaaatccatcctgtcttttacataatggacaaatcaagttaaaaaattttttagatagcttagcttattttctggtgctgttgacctgcaagagaatatactttcgcatatacaggtgaaagttttgcaatttatgtatacaagaaattgtaggcattaaaaatattttattgataaaataataataataaaataataataataataaaaaccatcagctgggcgtggtggcacatgcctgtagtctcagctacttgggaggcttaggtgggaagattgcttgagcctgggaggttgaggctgcagtgtgccataaccttgccactgcactctagcttgggtgacagagtgagaccttgcctcaaagaaagaggagagagagagagaaagaaagaaatggaggaacggaaggaagaaaggaagggaaggaaagagggagggagggatggaatgaatggccagtggctgcccactcttcttcctccttcacatcgtggggtaaataaggaaaacttctgggaggaggtgccgtgaggctagcctgaactagcagaattttcaggaaaaaggaaggaggcaggtatcactacatattaatacatactagaatggccaaaatctggaacactgacagtaccaaatgctgacgaggatgtggagcaacaggaattctcattcatttctggtgggaatgcaaaatggtacggccactttgaaagacagtttggcaggatcttacaaaaccaaacacactcttaccaaacgatatagccagttgctctccttggactcaaaggagtttacttagaggagttgaaaacttatgttacacaaaaacctgcacaaggatgtctatagcagctttagtcataattgccaaaacttggaagcaaccaagatgtccttcagtaggtggatggataaataaactgtggtgcatccagacagtggaatattattcagtgctaaaaagaaatgagctatcaagccatgaaaatacagggaggaaacttaaacacatattactaagtaaaagaagtcaatttgaaaagactatgttctgaatgcttccaactatatgacattctggaaaagccaaagctatgaagataggccgggcacagaggctctcgcctgtaatatcagcactttgggaggccgaggcaggtggagcgcttgagcccaggagttcgaggccagccataacgaaaccctgtctctacaaaaaatacaaaaaattagctgggcattgtgatgtgtgcctgtaatcccatctactctggaggctgaggcacgagaatcgcttgaactcaggaggtggaggttgcagtgagctgagatcgcgccactgtactccagcctgggggacggagtgagacttggtctcaaaacaaaaacaaaaacaaaaacaaaagctatggagacagtaagatcagtgattgtccaagagtaggtgccgggagagatgaatagagcacaggggattttgggagcagtgaaactattctgtttgatactgttatggtggatacatgtccttatgcatttgtcaaaacccatagaaagtgaaataccaagagtaaatgccaatgtaaactgtggactctgggtgataattatgtgtcaatgcagcttcatcaattgttacaaaactaccactctggtggggatgttgatagtgggggaggttgtgtactgggtgggggcaggaggtatatgggaactctgtattttctaatcagttttgctgtgaacctaaaactgctctaaaaaatacaatctattaaaaattctttgccgggtatggtggcgcacgcctgtaattctggcactttggaaggccgaggtgggtggatcacctgaggtcagcagttcaagatcagcctgaccaacatggtgaaaccctgtctctactaaatacaaaaaattatctgggcatagtggtacatgcctgtaatcccagttacttgggaggctgagtcaggagaatcgcttgaacccaggaggcagaggttgcagttagccaagattgtgccattgcactccagcctggacaacaagagcgaaactctgtctcaaaaaaaaaaaaaaaaaaaaaaacacaccataattcttatagaggggtttgggggataggcatttcctgtgggtgaacagcagcattgcatgaggggagggtgtcaagaatagagacctcaggtctggggaaacaggtggggcagggcaggtgtgccgctttggtctggatgtgagtcagtaggttctcctacccccggcagttcccaaaggtgctggggagatttttaaaacaccagtgacagaatctcacccccgtaagtgataaggcctgagcatcaggatgaagtctccgcagggggtcctaatgtgcagggtgaggatgcttcagttggcaacgggaagccattcagcttcctgatggacatttcaggggcatgtgccagggaagagggtttgtgtcacttttagacaatcggcttctcaggggaacctccgtctgtgctgtgtataccagaagctccacaaatgtctcaggacatcgatgacagcccctcagtagaagacctctctgttctggcccttctgccttgccccaggaggttccagctgtagttgatgaagcaaaactttccaagccagagggggtgttacaggttattgcctccacccaccttgtcagtgcttcagtcacaccctctgcccccaacagccagtcacacttgactggggcatcagaaccttcccctgcttcctgctggctggagggaacatctgatcctcatcatggaacagcccctgaagtgcactcagaataccaggtgccgctggctccctgggtctggccatacgccaggtgcgctccttacttggtttctctgactcctaatccaaatgagccaagggtctgaggggctgcacaggcagtaggtgtggagcacagctctgagcccaagcctgggcctccaagctgcgctgctgctgtagggcctgatctcccacctatcccttccctgcaggtcaccttcatgctgctggaccagaacaaccgtgagcacgccattgacgccttccggcctgacctaagctcagcgtccttccagaggccccagagtgaaaccaacgtggccagtggatgcccactcttcttccccctcagcaaactgcagtcacccaagcacgcctacgtgaaggacgacacaatgttcctcaagtgcattgtggagaccagcacttagggtgggcggggctcctgagggagctccaactcagaagggagctagccagaggactgtgatgccctgcccttggcacccaagacctcagggcacaaagatgggtgaaggctggcatgatccaagcaagactgaggggtcgacttcgggctggccatctggttaggatggcaggacgtgggctgggcccacaaaggcaaagggtccagaaggagacaggcagagctgctcccctctgcacggaccatgcgacactgggaggccagtgagccactccggccccgaatgttgaggtggactctcaccaaatgagaagaaaatggaaccaggcttggaaccgtaggacccaagcagagaagctctcgggctaggaagatctctgcagggccgccagggagacctggacacaggcctgctctctttttctccagggtcagaaacaggaccgggtggaagggatggggtgccagtttgaatgcagtctgtccaggctcgtcattggaggtgaacaagcaaacccagacggctccactaggacttcaaattgggggttggatttgaagacttttaagtttccttccagcccagaaagtctctcattctaggcctcctggcccaggtgagtcctagagctacaggggttctggaaacattcaggagcttcctgtcctcccagctcctcactcaccttcagtaacccccactggactgacctggtccacagggcacctgccaccctgggcctggcagctcagcttccccaacacgcaggagcacacccagcccccacatcctgtgcctccatcagctaaacaccacgtcacttcatgcaggtgaaacccagtcactgtgagctcccaggtgcagccagaggcacctcaagaagaagaggggcataaactttcctcttcctgcctagaggccccacctttggtgctttccagaatcccgtaacacctgattaactgaggcatccacttctttcagcagactgatcaggacctccaagccactgagcaatgtataaccccaaagaaataatttttagaatctctttcgaagttttcctaaagtgtatggtttgggagttgtttgtactgagccaggtttgaaaaggccattgctgagtttgaggtggtgccaccagttttgcaggtggcatcagaggctggcatgctggcaggaacatcccctcttagccccagtcttctcttttctataatgagacccaccccagcttgcctccctccctggcttctctgaccctcaaaggagatgccacgcaggacagactggagagagaagcctgggcaatactgcccgcctgtcatggcctggtggtggcccacacctatcttctcaccttggaggccacacccaactttccaaagaccctgagacaagtcaggaccctactactctcccctgctgctttcctgacagcttactcttcctccacctgctgagcctgtgccagactccattgctcaaatcgttagggttgcttctataaaaatgggtcagtagcccttcctgttctctccagcccagcatacaggaggatcaaaggaggtgacggagcatcgtggcacggcagtctcaatgggtcagaaacccaggccagctgggctctaagcctggcatcctgtcatgcttagtccttcagctgaagatcagaggaagcctctcccttgccctctccagctctaggggttttcaggaggcccaactgcaataatggagcactagtgcttttatgtgcaatggtgtcgtccatgcacgacagcagcaaacattctggggctgctttttattgttcccacggctgacagcgtggcagcggagactgtggaggcagtggagactgacttcttcctgctgacagctggatgtcacacatgaaggtctggcctagcgagtgatgggtctaggccctgaaactgatgtcctagcaataacctcttgatccctactcaccgagtgttgagcccaaggggggatttgtagaacaagcccccatgagaaacagctgttactctacacttttgattgcctatttctgatggcaagagatacatactctcttcaaagagcatgagatgcagccattctttcagcaaagcttcattgacacctgcacctgttaactgtgttcgacattgaagggagaaaggcaagatgtgcactctggactcaagaaactcttagttcagtggaggaaatgagcagataagtagatcattatgattgagagtaggagaagcttagagaaagcacagaatcccagatccagctggtgaaggagggaaggcttcaggcctttaagctcagcctgagaatattgtgaaatgcagaggatggggaaaagggaagagtaccgacttgaaaacggagagctgtcttggctgagggcagggtctgtgtggcaggatgggggagggagtcagaagggtcagatgaactggagtgtagacagcatcagatgcagcagtgcccaccgcccccccccccaccccccgccctgcccacagagcacctgctggtaaccctgggcctattgaaagcaggatgagatgataatttaagacactgaatgatttcttttccaacaaagctctatgttaagtgca

SEQ ID NO: 85 - DNA, 60819 bp, Homo sapiens
agcctgtggccgctcccggctcggagtgtgatctaagcaggttgcgtaccttcctcaggtgactccggccacagcccattgtccgcggccaccggcggagtttagccgcagacctcgaagcgccccggggtccttcccgaacggcagcggctgcggcgggtccatggagaagggccctgtgcgggcaccggcggagaagccgcggggcgccaggtgcagcaatgggttccccgagcgggatccgccgcggcccgggcccagcaggccggcggagaagcccccgcggcccgaggccaagagcgcgcagcccgcggacggctggaagggcgagcggccccgcagcgaggaggataacgagctgaacctccctaacctggcagccgcctactcgtccatcctgagctcgctgggcgagaacccccagcggcaagggctgctcaagacgccctggagggcggcctcggccatgcagttcttcaccaagggctaccaggagaccatctcaggtcagtgcgcccgcgggctgctagagcgtgcgggcggcgggggcggtgcttgcaggaaacgcgcgccggctccaggaagtttccggagttgcctcacttttggcgcaggaagccgggcgctgtcacctccgaacccgccctagcctgccgccctgccgaggccctgcgtggggcacagtcggggcttcctgggtggcagcgacctctcagccccggaactcgctgcagccgccttccaggggcccttcccgctcccagcgcgcagccctcctagaacgccccgggtgggcgtggacgggagcccggagccctctcgcctgagcgcccagcgcgggattctcggggtacctgcggttccaaacttgcccacgataaggatcacctgggcacttgctgcggcgacggcttcctgggtagttccttattgagatcccattgtcagggtgtgtatctggattgaagcctcggcgcgatccttccccgaaacctcggggacctgcattcccactgatttgccaggggatcggagtcttagagttgtgcttttttttttgtccacctcaagtttactccagttcaggacatttacaaaattcggcacaattttgggcacgggcttccccggagtttgaggtgtgaggttgattgggtgagtttgctgctgaaatctgtttcctccccccacccccaaccccgcaaaaagcagtaaagctactccgggattcggagggctccgtgggttccaggactcagtctcatccccgcaccctcccaccctaaaataaagccgggttgacccggtgctgttagcgtctgaggcgtgtcggcttttcacccagagggtggggatgcaatcagtgtgggtaggatgcaagatggggtgatggagagtggaaaatggggactttgctgcctgttggccagagaagcagtattggtctgtgtttaaaaaaataaagcttctggcttctacagctgggaccaaagacattattttccagtctacaccttccgtgtgtcttggtgacatttatttatttgccctaagaagcattctaccgttcactgttttttgaaagaaaaacagtgcgctggaaaggcaatctccctgccccagttatttctctgaaggagtgtagagcgattccaccaaatagaccctgggaaaaagaaagttattttttgcccagtcttccacaccccaaaggaagggtgggaaatcagaatgtgaaagagacggggccccaaaaggaaatgatgctacactctaaaaccggcagtgacttctagttctgtttccaaattcacttttttttacccctcaattgcaaaagtttggaatctcagaagagatttcaaaatacaaagactgaaaaataaactttcagttttctgtgggatcagctctttggaggtctagggctttaaatttgtgtgtgtgtgtgtgtgtgtgtgtgtgtgtgtgtgtgtgtgtgagatatttcacaatgtaatgaaatgtcttcttaaggccttactcattttgccccttgcagacacagaaagtggtttacttcacagcatcggccaggctttgggaatcctcccttaaagagaattcataggacagtgttctgtaatctagcatggatctaattacccaaagagagaggaatttctgaccctgagacaggtcacagaattatctaaagtgactcacagatttacttgagaaatggttagctgaaatatctcatgagcgaagattcatttaaagaggattaataactgcaaagaacacatcattccacattagaaaactgttctggttggccgagctcggtgctcacgcctgtaatcccagcactttgggaggccgaggtgggcggatcacctgaggtcaggagttcaagaccagcccggtcaacatggcgaaaccccgtctctactaaagatacaaaaaaattagccgggtgtgatggcgggcgcctgtagtcccagctactcgggaggctgaggcaggagaatcacttgaacccaggaggaggaggttgcagtgagccgagattgcaccactgcactccagcctggacgacagagggagactctgtctccagaaaaaacaaaaaaaacaaaaaaactgttctggtcaagttttactatttaaaaagtccatgggccgggcgcggtggctcacacctgtaatcccagcactttgggaggccgaggcgggcggatcacctgaggtcaggagttcgagaccagcctggccaacatgggaaaacccattctctaccaaaaatacaaaaattagccgggcatggtgtcaggtgcctgtaatcccagctactcaggaagctgaggtaggagaatcatttgaaccctggaggcggaggttgcagtgagccgagatcgcaccattacactccagcctgggcaacaagaactaaactccatttcaaaaaaaaaaaaagtccatggatgtagagacactgcaagattagtagttgtcagggactggcgagaagagggggatgggtagtgattgtttaatgagtatggagcttcctttggagcttccttttggagtcatgaaaatgttctggaactagagagtggtgatagttgcacaatattgtgaatgccactggattgtaacttcaagatggctaaaaatgaccaattttatatatattttaccacaatataaagacaggttttgtggcgtgcctgcagtcccagctactagggaggctgaggcaggaggatagttgttgctcaggagaacagcctgggcaacgtggggagaccctgtttcagaaaagaaaagtccatggagcggaccatttaagattattattattatgtttattttcatgtttttgagacagggtttggctctgctgcctaggctggagtgcagtggcgcaatctcggctcactgcagtctcactctgctggactcaagtgatcccacctcagcctcctgaatagctggaactacaggcttgtgccaccatgccctgctaatttttgtatttttgatagagacgggtttttgccatgttgcccgggctggtcttgaactcctgagctcaagggatctgcctgccttggcttcccagagtgctaggattacaggtgtgagccaccatacccagcccatttaagattattataagccattaattgaatataatcatgcattacattatgatgtttccttcaatgatggaccacatgtatgaaggtggtttataagattacaatggagctgaaaaattcacattgtctggtgatgtcttggtgatcctgacctgtgtaggcctagagtaatgtgtttgtttgtgtcttagttttttcctctcgtctcccccatgtcttagtttttaacaaaatttaaaaattaagaaaattgggccaggcatggtggctcacacctgtaatcccagcactttgggaggccaaggtgggcggattacttgaggttaggagttagaaagagaccagcctggccaacatgttgaaaccccatctctactaaacatgtaaaaattagccagatgtggtggcgcatacctgtagtcacagctacttggaaggctgaggcaggagaatcacttgaacccagaaggtggaggttgcagtgagccgagattgcaccaatgcactgcagcctggttgacagagtgagactccgtctcaacagtaaataaataaataaaaataaaaattaaaattaaaaatagaaaaaggtatagaacaaggatataaaatatttttgcacagctgtacaatgtgtttttgttttaagctgtgttattacaaaagagtcaaagttttaaatacattaagctgaaattattgaagaaaaaatatgtttagtgtagcccaagtgtacagtgtttataaagtttacagtagtgtacagtaatgtcctaggccttcacattcacttaccatgcattcactgactcacccagagcaacttccaatcctgcaagctcctttcatggtaagtgccctacacagacataccatcttaagtcttttctactatatttttactgtaccttttctatgtttagatgtctttctaaaattattattatttgtattttaaatatagaggcagggtctcactgttttgcccaggctggtctcgaactcctgggctcaagtgatcctctcctcttggtctcccaaagtgctgggattacaggcatgagctatcccacctggcctacatatctttaaatacacaaataccattgtgttacagttgcctgcagcattcattacagtaacatgccatacaggtttgtagcctaggaataataggctctaccgtgtagcctaggtgtgtaataggctatctcatctaggtttgtgttagcactctcttccttcagtgtttgcgatatgaaactgcatttctcaggtgtttctcagaatgtatccccattgttaagcaatgcatgaccgtactttttaatgggttaaaagctttacgttggatggtcttggttcatcttccagttttcaagtaaacatttctcttatccccatgacaaggcaactgaggcagagaggttgacacaagtagtagagctggtatttgaatccagagagtctgactgcagaattcttagccacttccttatactgctacagagagaactgaatcagtgtaccctatctgtatatttcaaactgtgaattgggtcaacagcattaaaaaaaaaagtggagtagccgggcgcggtggctcacgcctgtaatcccagcactttgggaggccgaggcgggtggatcacctgaggttgggagttcgagaccaacctgactaacatggagaaaccccttctctactaaaaatacaaaaattagccaggtgtggtggtgcatgcctgtaatcccagctacttgggaggctgaagcaggagaattgcttgaacccaggaggcggaaattgcagtgagccaagattgcaccattgcactccagcctgggcaacaagagcgaaactcagtctcagaaaaaaaaagtgagtagaggttgggcacgggggctcaagtctgtaatcccagcactttgggaggctgaggtgggcaaataacgaggtcaagagatcaagaaccccgtctctactaaaaatacaaaaattagctgggtgtggtggtgcgtgcctgtagtcccagctacttgggaggctgaggcaggagaatcacttgaacccgggaggcggaggttgcagtgagccgagattgtgccactgcactccagcctggcgacagagcaagactccatctcaaaaaaaaaaaaaaaaaacaaaaagtggagtagaatggataagatcagtctatcacatatagtaaggacaagtgttttgagaaacttcttcttttgttttttttttttttgagatgaagtctcactctgtagcccaggctggagtgcagtggcgcgatctgggctcactgcaagctcggtctcccggttcacaccattctcctgcctcagcctcctgagtagctgggattacaggcgcccgctaccacacccggctaattttttttttttgtatttttttagtagagatggggtttcaccgtgttagccaggatggtcttgatctcctgactttgtgatccgcccgcctcggcctcccaaagtgctgggattacaggcgtgagccaccgctcccggccgagaaacttctatgtaggttttataggcataattgtgtgtgtgtgcactggctccagatgtaaaatgcatttcttactgtaggttgtagtcaaaagtttgaaagcctgtatctaggggatctgtttaaggatttaatatttcttttttttttttaaagagatatataattaaagagaagacagagtagtgagaacaaggatgatgctgaacttaaaggaatgaacctgaaatgtggtggggtcttggaccaacctggatggcagggagaaggaaggatactggtgggagataggagtgagtgggaacccacatctttaggtccataaacgcttctgcacaatcccttttatttctttagagagcatgagtcaagtggccactatatattgtttttggataagaacatacttctctgaaggtcacttttctgtgcttgtaaacaggatacaggactttatatcttttatatatctgtattctatatattaactcctggttagtaatgttgacttaagtgttgtaaaatttaaaataagttggtattttacattcttcaaaatccatttttcctcccagtgcctcttgtgtggattgatccaaattcctggcattctggggaatttgttcagttttccctacgttgcagcgtctctccatgactgtctccttgtgcaccttttccctactttccagtgtgtaccttccatgggagcatctgtggtcatctgtgaccagggtggtgtcagggttgtataggtttcctagtactattccctactggactgtagctcatgggctaggagggagggctggaggagacgctatcatctctcccaggaactggctgtcctttgaatctacatcacaagctgatccttggaccagctcagaccagctcgtcttgatctatttctgtgccatttcagtttagctgtatcctagttctcttaaatattcaaggttttatcttggtgagttctcctttctatataaggtacctttcctgtatttccactattcttttattcagaacctacacttagttaaattggagagtctgctattctctgagggccttgatcttcatgcccctgtaactgacccttccaggtatacatgggaacagcctttcagacagcattatctaccaaggattaaatgggtataacttgttccatcagttgttttttatgagtttttgggaatatgcaagagtcttgactctgtcacatttccagttaaagtaggttttagcttgtctgccaagacagtttttataaatcatgttaacagttcaaaattttgggaagcatgcatataatccagcgtgaggagatggcattggagatggctgactgcttccctgtgagggctgaggaagcacagacactggcagtgagtcatatccccacctcagccattttcactggaagattatgtctattcgctaaagataatgggaggcaattagatactttgtttatacaaaaatgcatcttagacacttcatactgaaatgtagcaatcacaaaaggtttttctttttgaatcacaaacctctcggatttattaaattagactgctgtggtgaactaagaattttaacaacttctaagatgtgaagaggaacaaaaacataaactatttactattctctcctatatcatgggtgaaaggtgagtttatatcccaagttttaaagtatattatagaaatgctcttctcatcattaaaaggtactattttagatgtgtagctcactcaaattttgatccattaataatttttgtgcttggtttgttaatgaacacttatataggacttagttgtgttcattgccagaaagagcactgtgaataaagaagaaaaaataacaaggcacttttgacatattatatgattggaattttggacatgtctaagtggaataaaacagttaagaagttactgagaaagggggagaaaagccaatcctaatagtttcttttaaaaatggattatctataaacaatttttctgacatgggaagaaaaatcaatatacataacttcactatagcaagcaaagccttcaggttggtactcgtactagattcccagggctgctatcacacagtaccgcaaactaggtggtttaaatgacagaaataaacagtctcacagttctagagactaaagttccaaaatcaaggggtcagcagaaccatactcactccagaacctgtagtgggggaggctgtccttgcctcttcccagcttctggtggtggccgtcagttgatggtgttccttggtttgagctgcgtcactccagtcgctgcctctgtcagtgtccatgtttttgttttgtcttataagaatgtcagtcatatgaggcagggtccactttactccagtatgcctgtgttagtttagctaattacatctgcaacaaccctacttccaaataaagtcacatgctaaagatacctggggtttaggacttcaacatatcttttttggcgaatggcacaattcaacttgtattagtactaaatactattattaaaaaaattagtaggaattttactacaatttcattgatcatcaagtactacgcacttcactgaacgctgggaatgcaggatgagcaaaaccaggtatagttcctgccttcatggaacttacagcctagcagatagaatcacatgaaatagaaatgtgttgtgagattgagaaatgtgatgataaacaaaaacacagctcagtgagagcacttggcataggaacttgaccaatgccaggagatgggagcatgaatgggtgaagcgatgcttaagccgactgatgttctgagtaacaaatactgctgatggcttactttgtgctaaacagtgagtttttacatgtgttacctcatttgatcctcacagtagcacgatggggtaggcaatattattcccattttatacataaggaaattggggcacagagagaactttcccaagactgtatcttgaaagtggcggagctgagaggatgatatagaaagagaatcattgtaatctctggtaggtgatttaattttaataataatattttactgatttatttgaatgatttctcccttcttcctcacctatccccgcttttgtattttctctgctatttgctttgtccacctctagaaacccttccatgcctgggcattccccacctgactcatttgccagtgatttctatatgaggactgtaatttgagtctagtatttggttgagtagactgcagtgttaaaactcaccaggagagggcaactgtctaatcattggatcccagattatgaatcctggattatgtgaacaattctcagttccaggttatgcaaacaaatatgtttcccatggttataaatttgctagagtctatagtaattagattgggatataatttgtgttgggttatgcaaagagtatctgaaccaagttaaatctgttatactcaaggccaagaggacattcatttactagaattttattctattggagcccattagtagaaatatttatttatttggaggcagagtcttgctctgtcacccaggctggagtgcggtggcatgatctcagctcactgaaacctctgccgcccaggttcaagcaattaccctgcctcggcctcccgagtagctgggattacaggtgcccaccaccatgctcggctaatttttgtatttttagcagagacagggtttcaccatgttagccaggttggtctccaagtcctaacctcaagtgattggcctgtctcaacctcctagagtgctgggattacaggcatgagccaccgcacccggccggaaacatacaatgtttgtccttcatgtctggcttattttactttgcaaaatgtcttcaaggttcatccacattaaaaacatctattttatttttatttttattttttgagatagagtcttgctcttccgcccaggctggagtgaagtggtgtgatcttggctcactgcaacctctgtcccctgggttcaagcaattctcctgcctcagcctcctgagtagctgggattacaggtgcccaccaccatgcctggctaatttttgtatttttagtagagactgggtttcaccgtgttggccaggctgttcttgaactcctgacctcagatgatccgcccgtttctgcctcccaaagtgttgggattacaggcgtgagccaccacatcagtaattcattctgtacaatgttgtatattctcaacacatattatattttaatttccttatttcaagaaaaccttagaattgaagatacagtagttccccttatccttggggatctgttccaagacccccagtgggtgcctgaaactgagggtagtaccaaactggattgccatcattcagaataaatttctgtttgtgtcttctacccacaaatttcatgccttttccatcttaactaagcacttaccatgtgctgtggccatagcttttgcagtctgaagtacaataacaatactagcatgaatttttttttcctccttcacagtttcacagatagaagatttgttcttaatatagttttagcaacctcagcgtaatgattttgttcattaataaactgagaactttaatctttttcacttgaaggaaacacagcttctctttggcataactgaattgccaacgtcactactcttgtggtttagggccattgttaagtaaaataagggttacttgaaaacaaacactgcaaaactgaaggttgatttgatcactgagatggatactaagtgactattaggtaggaagcatagacaatgtggatgctctggacaaaggattgattcatattctgggcagaagggctggagatttcatcgcaatactcagaatagcgtgcattttaaaacttatgaattgttggctggatgcgatggctcatgcctgcagttccagcactttgggtggccgaggcaggtcactgacttgagctcaggagttagagaccagcctgaccaacatggccaaacctcatttctacaaaatgtacaaaaattaagcaggcatagtggcatgtgcctgtaatcccaggtactcgggaggctgaggcacgagaatcacttgaacccgggaggcggaggttgcagtgaactgggattgcaccactgcattccagcctgggtgacagagggagactctgtttaaaaaaaaaaaaaaaaaaaaaaatgccaggcatgatggctcatgcctgtaatcccagcaccttgggaggccaaggagggcgtatcatttgaggtcaggagttcgagaccaggctggccaacatggtgaaacccccatctctactaaaaatacaaaaaaatttgctgggcatggtggtgcacacctgtaatcccagctgctagggaggctgaggcaggagaattgcttgaacttgggagccgaaggttgcagtgagccgagattgtgccactacactccaacctggatgacagagtgggactctgtctcaaaaagaaaacaaacaaaaaaaccttatgaattgtctatttctggagtttttcatttagtattttcagaccatgtttgaccaagggtaactgaaactgtgaaaagtggaactgtagatggtctctatgagtagtcactgttaaaggggaaacaaagatgattgttggcctgatcttggccttcaaggagtaaaggggttctgtgtagtcagagggaagctgggtgcttctggtggagagacaggaaagtccagatgttatggagaaagtagcttttgagttgaacctagaaggaaattcattttgagtttttttgggttgtttgttttttgcagaacgtgtccatgctggtttagagattatggtctaagtgtttttcaataaaaggcatacactaacattcatagttacctgtaccagagttaaaattaaatggagttttcaaggcaattagatttattttaaacttttaaaagatcaatattaatggcattagggccagctcctttatctgatgtctttaaagttcattctggccatagtcaacccttgtaatgaattttaacctgacacatgttgctacttcatctagtctttgtaacctggttatttatttattttttgagatggagttttgctcttgttgcccaggctggagtgcaatggcgcgatctcgtctcaccgcaacctccacctcccaggttcaagcgattctcctgcctcagccttcccaagtagctgggattataggcatgcgccaccaagcctggctaattttgtgtttttaatagagatggggtttctccgtgtgggtcaggctggtctcgaactcctgacctcaggtgatccgcccacctcggcctcccaaagtgctgggattacaggcgtaagccaccgctcccggcctggttatttgttttatctgcaattattctttctcgtgaatccccttggctaatcatgctcacaaagttctgacacatataccacctgaatatttctagaatctgagtcatctttcacttaaattacaataacctcttaactggccttcttgcctcctagcttgtcctgctctgatccattcatgccaaagtgatttttctaaaattgaataagttttttccttgcaaaaaacacttgattgattttctgttgtctttcctcaccattgctgtgaggttttgttctgttgtagcctcttgctacattttttggcatttttttcttatcttccatcgcatttcctcatatagggcaatttagtattttagtttagtgcatagtttagtgcacagttaatctgagaaaccactctgtctcatttccttgctggagctggagacccaggtgaagatcctgaggtttgttcttttgcaatgtttggcctttattatctgccctcctcctgtaatttattttactgtcctttttgtttttggttggcaaccatggggaggtggctgctgcctcttgcttatcaacaactgttgcttatggagacttctgtgaacaagcagccaggtttaggtgaggaaattggccgtgactgaattctgggtgaatttttcgaggtccagttggtccaaatgtttgtgatgtgcagtcctaagaggccatggctcttcctgtgaagtgtgatgtgttttatgtatcacacattagtttttatttgtcctaagcaggaatcagaactcagttcaatagaggccattggcaaacatcccaaacaaggaatctctcactaaaatagcttaaaatataattttacctgtgtggtctaggcatttgtggtacagtgttcgttagcagtgaggaagggctatgcgtgcctggagatcagatgagaggccttaactcagtgaggtcgctgactagttgactttaaggcatagctgctgtagatcatacccctctaattgaccccaccatttatcgtttatcacatgggcagccctggaggtatgcctctctgatggcctatcaaaaagaatctgcccttcagcttcaaggaacagtttgctgacagcctccagctgttagtgctgtcaggctttgcctccacggaggccatacttatcccatgctgcgtgtcctttcattttggtgtcatctctttctccccttctacccctcctccaccacagtaaacagctttttgagggctggggctgtttataagtgaagtagtttataaaaagtagatgcacatctttcagcttcatatttagcatgttggaaattctgttcactgatctaattctgaaatctccttggtatttcttaaactagttgtataggctgggtgcagtggctcatgcctgtaatcccagcactttgggaggctgaggtgggcagatcaccaggtcaggagatcgagaccatcttggctaacacgctgaaaccctgtctctactaaaaatacaaaaaaaaaaaaaaaaattagccgggcgtggttgtgggcgcctgtagtcccagctactcgggaggctgaggcaggtgaatggtgtgaacccgggaggcagagcttgcagtgagcggagatcatgccactgcactccagcctgggcgacagagtgagactccatctcaaaaaaaaaaaaaactagtatgtcaacaaagctttgtgctgctgtaatgggaagaacagctagcctgggctagtaatatgctaactggtttatgaacttaggtaggtgagtcacttgactattctgggtctgttctgaagggagaggcagtaggactaggagttaaattgtcatgccgaggtctctgagcatgggtgggcctgtcagaattgtcatcgctcactctgttgacttccagcagctgacaggcaaggccctaggaagctcttcagcctcctttccttgctagaggtgctgttttccctggaaatgttcaagccctgcaaatcgtttctatagtaacaggtctctgtcttttttcttatgatgcagatttttgaaaaggtttcttatctaaatgttcttgggatctatggtcttcctacctgtagctcctttgattagacagagcctttatttaaagacttttccccccaagaatgttgttgttgcttctaccaaaataataaccagttgttagttttactagtgcttgaagttttagtttattaataaagcttcatataaactagaaaaggagtggttgggtagaatagtaataccgaaaaaactaatattcactgttagtctcatgtatttgtaaactttaattttttattatgtaaaaccttcaaacataaaagtagtcaaaattatataatagacacctatatacttaccacctagattgaaaactaacattctgccatattggcgtagtttattcgtttactgatagtaaatcagagacatgtatttagaggtgaaatgtcaccctaaaaagcgtttttcttaatgatttacaccacccttagtaaaattagctattcattccttcatatcatctaatacctaatatatattcacatttcctcaggtgtctcaaatgtcttttactaatgattttttccaacaaggatccactcaaggtccatacatttgcatttgattattacgttttaatctggaatagcgcctaccgcccccaacccctgccactgctttatcagagaggtcagttgtcctgtaagatactctacctttatgatttgtatgatttttgtttgtttgttttcatttaacttctatatttctcatattcctggtaactgcaagtcaggtctaaagacctcactaaattcctggaaaacatttttagcaggaatgctctgtacttcatgcactgtcacaactgggagacactaagtatttggatcttgaagatttaaagacttctaattggtttttaaaagccctgtttcactggttttctaggataagcttctctagagaagttcctttttaaaaaatgttttattagtttgaagatttaatgggattttcctttcccctgaaattcttccagtttgatttcaaaaagaaaaggtcaacatagcattacatttctgaattttccctcaaataagccaaataaatagttggtgaaacagtattttgtgactgatgcgcaccactttggttctggcagtctctgggcattaggccactctttctgctctgctctcctggctgacagtttataatggattttacttttcttttaaaaaatcagatttgctgtcttttgctgtcatcagctctgggccttgtcaccacatggcagacttcaacctacaataacccctgatgcgtgtttcctgaaggggacctctccccttcagtccacacttctagtaggttgagttcagcccaagattaaggctctggtctggagtcagaagatgggtcaaaatctagctctcccaccggctggttggctcttcttcagcagtcagctagtgtttccaaatgacagtatctgtgtcctcatctgtaaagtcgggacaataactggtgttttttttgttttgttttgttttttgagacagtttcactctgtcacccaggctagagtgcagtggcgcgatctcggctcactgcaagctccgcttcccgggttcacgccattctcctgcctcagccccccgagcagctgggactacaggcacccaccaccgcgcccggctaattttttgtatttttagtagagacggggtttcactgtgttagccaggatggtctcaatctcctgacctcgtgatccaccggcctcggcctcccaaagtgcggggattacaggcatgagccaccgcgcccggcctataactggttttgactaatgcgagttgtggtagggcttgaaagaaatcacaaactaaatgtaaaatttaatttgaaaaatgctgtccaagcaggaactcacatccaggaacaaaatgaatggagaccagaaatccagatatgtatgcccaagaaaagcagaattttatccaggacttctcccaggttgtcaggatgctgactgaggatgagatggggcacccagagacaggagagtctattacctggctcaaagaggtcctggagtacactgccactggagacaagtaccactagggtttgatgatgctggtagcattccaggagctggcagagcccaggaaacaggatgctgatagtctccagcaggtcctgtctgggctgttgtgtgaactgctgtaagcttgcccgtttttttttgttgttgttgttgtttgttttttgagatggagcctagctctgccgcccaggatggagtgcagtggcacaatctcagctcattgcaacttccacctcctgggttcaagtaattcttgtgcctcagccccctgagtagccaggactacaggcgcattccaccgcacccagctaagttttgtatttttggtggagacggggtttcgccatgttggccaggctggcctcgaactcctgacctcaggtaatccccctgccttggcctcccaaagtgctgggattacaggtgtgagccactgcaccttgtgctgcaagctttcttcctggtggcagatgacatcagggattcatccctcaccttgctgggggcagatctgcttgtatcagaagccaggtgtaggtttggatgccatcaatgatgctatgcttctagaagcatctatctatcacctgttgaagctctgttgctgagagcaaccccattacctgaacctgaaaaagcacttcctgtggagttcctattagacagagatcaggcagaccctggaccccatcacagccccccagagcaatgtggatcttgactggttcactgaaaagaggtacaaatcactgtcaagtataagacagctttctacttcttctaccatcctgaagctgcagccatgtctatggcaggcgtcagtgtggggaaggaatgggccaatgacaggaagatcctgctggagttaggagttctttcagattcaggatgattaccttgacctctttggggaccctactgtcaccactggcagagtttgtactgacatccaggacaacagatgacaacaaatgcagctgactggtggttcagtgtctgcaatgggccacaccggaacagcaccagatcatgcagaagaattacagggaggaggcactatatgaggagctggatctgctgaccatgttcttggtatgtggaagatggttacagccaccttatgggtctcattgagcagtgtgttgcaccactgcccccagccaccttcctggggctagcgtacaaaatctccaagcaactgcaaggcagggagaggaggctctcaataaattactgtgtaatctttttttttgttgttgttgttgttgttgttgttgttttgagacagagtttcactcttgttgcccaggctggagtgcaatggtgtggtcttggctcactgcaacctctgtcttctgggttcaagcgattctcctgcctcagcctcccaagtagctgggatttcaggcacccgccactacgcccggctaatttttgtatttttagtagagatggggtttcaccatgttggccaggctggtctcgaactcctgacctcaaatgatacgcctgccttggcctcccaaagtgctgggattataggcgtgagccactgcgcccggcctactgtgtaatcttacaaaaaaagaaaaaaagaaaacaatgctctaaaagagaagggaattttgtttctgttccatgcatagacctacacaggcttttttccttttgctgtttcccacttccatatcttattttatatggtacttttcttcctttccctttctaggaaaccctccctccacctttcctcctactcgacctttaggcctgggtaaaattttaatcttcaatacaatcatattgttttgtctcagcccacaagttttcatttatgtgaactatcagttttacaatttaacctctagtcattctccaaatatttttacacctaggcctcttatttctgcagatctcaagttgcttgaggtcatggtttgatagatttgttttcagctcagaactatgaaaactttattgtattaccctagacattgatttctaatgagttggttgtaggatgcaactggtttcttaagtgggggatatttttctagaatgtgggtacaactttctgatgtgaggtcctcacaaatttttaaactttgctccagcaaaaagaaccacgtagaggttctctacctgggtccttcctgcctcaccttctttaggtggagttggctccagtttcctccttgtctctgcctccaccccacccctgccccaggcctcatagtgttccacaggaatgacgtggtgactgtagtgagggttacagtgaagaattgcccactgtttggccttgctgaacagcaaatttgggccagcagtgggtctgttttctctcttttctttttatttatttatttttttgagacagaatcttgctctgtctcccaggctggagtgcagtggcgtgatctcggctcactgcaagctccacctcctgggttcactccattctcctgcctcagcctcccgagtagctgggactacaggcgcctgccaccacgcccagctaattttttgtatttttagtagagacggactttgtccgtcttagccaggatggtcacgatttcctgacctcgtgatccacctgcctcggcctcccaaagtgctgggattacaggcgtgagccaccgcaccgggctttttttttttttttttttttttttttgagtcggagtctcactctgtcgcccaggctagagcgcagcggcgcaatctctgctcattgcaaactccgcttctcgggttcaagcaattcatctgcctcagcctaccgaatagctgggattacaggcacgcgccaccgtgcccggctaatttttggacttttagtagagatggggtttcaccatgttggccaggctggtctcgaattcctgacctcgtgatccacctgcctcatcctcccaaagtgctgagattacaggcgtgaaccaccgcgcccggccagcagtgggtctgttttcaaccctcatgtaccctcagctctcaagcctgtgtgctcccaccccagccagtcaccagaatcacatagattttaaaacgacttatcctgggtccatccctacacatagtaaatgagatttttgctgggtagcttgggacgctatattttccaaaactccctgttgattggctgtatttgggaacccctgttgcgaaggaagatcccttatctcttcatctgtcactaatgatggtggcttgcgcactctgatggtacttacttggatgggattacagatggttccatcacacccatctgtatgaaatctcgtggtataagtgaatgtaggatgataagggacgagcctattagaggcttttgaagcaaatggatagtttaatcagattggtgtgttttttttttctgtagaactgctgtgaactagaccttgttatcaccatctgtttcgtaaattccattttcggtttaacagctggattgtgaaagatatacaaaattatccagttaaaaaactaaatttggcaagtgtgtgtgtgtttttaaaaatgactccttgaatacactgttttgattccttagacagtttctaaggctctaattttggtctaccagaaatattcagagtagtaaactgagaccagaaaggcgagttctttggcttggataactttgagagttaatagtatacatgattggcagccttcagttttatccagcaataaatctaaacagtttaaaataagtactttccccttacctcagtacagagaggccctggccactgccatgcacatctcagaagctgagcagtggggcagaaggataacttgtaatttggcatcaatgtccaacacccttgagctctggactcttttattcattccttctactttaccattctacatcttgaaccactgtgcgtgcggttcccctaagaggcagtaaagtaattgcatcagggtggagggattttatgtgctttcactttctcatttgattatttctacatcttaccgataaacttccatgaatattactgttgtaatgaggagcaaaatgttagtaaagataactttatacgtgaaaacttgaactcttaccaagaaacgtagtgtttgtgacaaggctggctgagaggatgagaatagctcatcagtactgggttggctgaaggaaacatgcatgtcagtactattttgagggcagctgagaacatctatttcaatagctttggctatattttaatagctaagagcaacatatgaatttgtctctgccaaagatggagtgaaaatttccaaaataaccaaacttttactttttttgcaatacattaggtctttcctgctgacaaacctacagtttatgaaataagtttgtggagcatatcaaagctgtgcggcagctctgtgcactccagcagatggtgtgactggttgtctgtagtcgtcttagtttccgccattgtgtcagtctgtggaatgtttgggttcatgcttattttggccaagttttccaaattctgtcttggtaagtacaaaaagctgtgagtgtcggaagctctaacaagaggtgtactcatgatgaaagtgaaagcagagagagcgatttttttttcctctttgaatttgttttaacatgctcttacttgtaggacaaatttttcaaacaggtggtagaaagcaaaacatcttaatgccatcttcagggcagaagactttgagttgcaggatgtgatttagggaggattttgaaagagtttgcagcactgcgtgaagctggctgggtcttcctgtgtactcctccttgccctcctcctatagcccctccatgcaaaggtaacctgtttttttaatgtttgtttctttttaaaatttttttatttttatagaaaaaacaaatgccagcatgtgtatgaagaccttaatttaaaaaaatatttttattggcctggcgcggtggttcacacctgtaatcccagcactttgagaggctgaggagggcggatcacctgaggctgggagttcaagaccagcctgaccaacatggagaaaccctgtctctactaaaaatacaaaaattagccaggcatggtggcacatacctgtaatcccagctactcgggaggctgaggcaggagaatcgcttgaagctgggaggtggaggttgcggtaagccgagattgcagcattacactccatatattatggagtatatatatatggagtatatatatatatggagtatatatatatatatatggagtatatatatatatatggagtatatatatatatggagtatatatatatatatggagtatatatatatggagtatatatatatatatgagtatatatatatggagtatatatatatgagtatatatatatggagtatatatatatatggagtatatatatatggagtatatatatatggagtatatatatatggagtatatatatatatggagtatatatatatggagtatatatatatggagtatatatatatggagtatatatatatatggagtatatatatatatatggagtatatatatatatggagtatatatatatatggagtgtatatatatatatggagtatatatttatatggagtatatatatatatggagtatatatatattttatatattatgtattatataatatatattatattatatataaaatatatattttataatatattattaatgaaatttctcacatatacaagactgtatgaacaagtttaatcaaaatacattgggttttgacaaatcttagtattttgctataattgcttttaaaaaatacagatagtttaaacttcctagttatcacttcctgatccagttatcatctcactacagaggtaaccactatactgaatttggtccctaactttctttttttttttgagatggagtcttgctctgttgcccagactggagtgcagtggcatgatcttggctcactgcaacctccgcctccgggttcaagcagttcttctgtctcagactcctgagtagctgggattgctttcatgtctttttttttttttttttttttttttgagacagagccttactctgtcacccaggctggagtgctgtggtgcaatgttggctcacggcaacctccgcctcccagaatcaaacgattctcctgcctcagcctcctgagtacctgggattacaggcatgtgccaccacacccagctaatttttgtatttttagtagagatggggtttcaccatgttagccaggctggtcttgtactcctgccctcatcggcctccgaacgtgctgggattacaggcgtgagccactgcgaccggcctcatgtctatttttatactttcattttctgtatatgtttacaaacaacatgtaacattgtttttacttaatttaaatggctcatactctacatatccttctgctacacgctttttacactgaatatcctttcaaggatttataaatgcagcccaaatttactgactttcattgctgggtcatattttattgtgagtttacccaaactgtgtaattgttcttctgattcactcttctctatttttgctattaccaacaagatggcagtgattttttttttttttttttttttttttttgagacagggacttgctctgttgcccaggctggagtgcagtggtgtgatctgaagtcactgcaaccttcgcctcccaggttcaagtgattctcgtgcctcagcctcccaagtagctgggactacgggtgcatggcaccacatccggctaatttttgtatttttagaagagatgggttttcactatgttggccaggctggttttgaactcctgacctcaattgatccacctgccttggcctcccaaagtgctgggattacaggcgtgaaccactgtgcccagctgaaaattcttatgttcccttggctgcatgaatttctttggagtcccttcatttaaaaatgtattttaaggaagtgaattggtccagcgtggtggctcacacctgtaattcgagcactttgggaggctgaggtaggaggagcttgagcccaggagttcaagatcagcctgggcaacataatgagactctgtctctacaaaaaaataaaaaattaactggatatggtggcatacctctagtcccagctactggggaggccaaggtgggaggattgcttgagtctgggagatggaggctacaatgagtggtgattgcactgctgcactccagcctgggtgacaggacgagaccttgtctcaaaaagaaaaaaaagtgaatcatagagtaaagacagacatattaattgaataaacacagaagatctatgtttaactccagctttgtgcatggtgttacagggaagtgtgtagaagctccaaagccttcagatataatgcttaactcagaaacttatagcccagtgtgtctgtgggacgtgggcacaaataaccatggtactacgaggcatgatgagataagcgctgtatgctggtggaggtagctctgatattagatggaactatgagggtctggaccattctccaccaaatcaggataggcttatctttgttagcaccttgagttgatttaattccagccaaaagcagaggtgtgatgccctaggcacttctctctgtctcttctcttaattttaaaaccagtaggcagactccattagctctttcctatcctttaggatggatgctcactcagatgttccaagtcatcttccactgtcttttaactctgtccttccagggagatgcgtcaggtgtccggcttcctcagagagctggagttgttggtgctgatcaccagatactccagacggcactaattcctatactatgggttcagagggaactccattggacagaaatttccttttgaggaaatctttccctggagtttcttcttacctttttccctcactttctccacagcagaaacaggtctgtttgtccttaaatatttacctatatatttgagtaggagcattttgaagagatgaagtttctgtgtagcagcacaaaacatgaaatagttcaaaccaggggcactctggttctcagaccgggagcttcaggatcttctgggaacttgttagaaatgcaaattctcaggtctgctcagatcacctgaaacagaagccctaggggtggggcctagagatttgtgtcttaacaggcccacagcgggagtctgggaacccctgtttcgaagtatgcttaaataagcacttgggggccaggcatggtggctcatgcctgtaatcacagcactttgggaggccaagacaggcagatcccttgagctcaggaatttgagaccagcctgggcaacatgacgaaaccccatctctacaaaaaaatacaaaaattagccaggcatggtggcttgcgcctgtaatcccagctactcaggaggctgaggtgggaggatcacctgagcctaggaggtggaggttgcagtgagctgagattgtgccgctgcattccagcctgggcaacagagggagaccctgtctcgagagaaaaaaaaaagcacttgggcttgtattgtgggcctgtcttactatactttcagaaaagggtctggcagactaaatacttgagggatgttacccagcagtgttatttgttgacattgcttaattatgaatgacatgagaaaggtatacctgaaaactgacattgtgtggtgttgttgtagacaaacctttaacttgtggaggctgctttcattttgtttgtggttgtgaccaaccgtaggaaacagaatgccataaatccctgtttccagggttaccttcttgctgctgataacaggcaggaaattaaaacaatatgtgatagtgttctgttcttattacctacagatggtagcttttagatatgttggagcaaaacataagtaaatatagcagggaaactttattactgaagaaaaatgatttggctaggtcaaggttatagtctggttcattttaataaaatggggcataggcaacatatcagtgttccattatcacatgaagcatttagctgtatgaggatcactagattttttttctctttgatttaattttgagtatgtaaaacatttacatgattccaaggtcaaaactgtgtaacaaattatattcaaagatgcttccctttcatccatatcccttctgtctcttctcttactgctttgcaggtaatcatttttactagcttctgaatttatccttccagtgtttctttttgcagataagcatatacattcatatgtatatgtcatatgttcatagctcctccttccactttcattacacaaaaggctacatactatactacaattttaaaaattattattattattatgatttttagagacagggacttgttctgtcacccaggctggaatgcagtggtgtaatcatagctcactgcagcctcaaactcctatcctgggttcaagggatcctcctgcttcagccgcctgaatagctaggactataggcacatatcaccatgcagtactttataattttttttttattattatactttaagttttagggtacatgtgcacaatgtgcaggtttgttacatatgtatacatgtgccatgttggtgtgctgcacccattaactcgtcatttaacattaggtatatctcctaatgctatccctcccctctccccgcaccccacaacaggccccggtgtgtgatgttccccttcctgtgtccaagtgttctcattgttcaattcccacctatgagtgagaacatgcggtgctttttgtccttgcaatagtttgctgagaatgatggcttccagcttcatccatgtctctacaaaggacatgaactcatcattttttatggctgcatagtattctgtggtgtatatgtgccacattttcttaatccaatctatcattgttggacatttgggttgcttccaagtctttgctattgtgaatagtgccacggtaaacatacgtgtgcatgtgtctttatagtagcatgttttataatcctttgggtatatacccaataatgggatggctgggtcaaatggtatttctagttctagatccctgaggaatcgccacactgacttccacaatggttgaactagtttacagtcccactaacagtgtaaaagtgttcctgtttctccacattctctccagcacctgttgtttcttgactttttaatgatcgccattctaactggtgtaagatggtatctcattgtggttttgatttgcatttctctgatggccagtgatgatgagcattttttcatgtgtcttttggctgcataaaggtcttcttttgagaagtgtctgttcatatccttgagaagtgtctgttcatatccttcacccactttttgatggggttgtttgtttttttcttgtaaatttgtttgagttcattgtagattctggatattagccctttgtcagatgagtagattgcaaaaattttctcccattctgtaggttgcctgttcaccctgatggtagtttcctttgctgtgcagaagctctttagtttaattagatcccttttgtcaattttggcttttgttgccatcacttttggtgttttagacatgaagtccttgcccatgcctatgtcctgaatggtattgcctaggttttcttctagggtttttatggttttaggtctaacgtttaagtgtttaatccatcttgaattaatttttgtataaggtgtaaggaagggatccagtttcagctttctacatatggctggccagcttttccagcaccatttattaaacagggattcctttccccatttcttgtttttgtcaggtttgtcaaagatcggatggttgtagatatgcggcattacttctgagggctgtgttctgttccattggtctatatctctgttttggtaccagtaccatgctgttttggttactgtagccttgtagtatagtttgaagtcaggtagcgtgatgcctccagctttgttcttttggcttaggattgacttggcaatgcggtctcttttttggttccatatgaactttaaagcagttttttccaattctgtgaagaaagtcattggtagcttgatggggatggcattgaatctatggccattttcgcgatattgattcttcccacccatgagcatggaatgttcttccatttgtttgtatcctcttttattttatggagcagtggtttgtagttctccttgaagaggtcctttatgtcccttgtaagttggattcctaggtattttattctctttgaagcaattgtgaatgggagttcactcatgatttggctctgtttgtctgttattggtgtatagaaatgctcgtgatttttgcacattgattttgtatcctgagactttgctgaagttgcttatcagcttaaggagattttgagctgagacaatggggttttctagatatacaatcatgtcatctgcaaacagggaccatttgacttcctcttttcctaattgaataccctttatttctttctcctgcctgattgccctggccagaacttccagcactatgttgaataggagtggtgagagagcacatccctgtcttgtgccagttttcaaagggaatgcttccagtttttgcccattcagtatgacattggctgtgggtttgtcatagatagctcttattattttgagatatgtcccatcaatacctaatttattgagagtttttagcatgaagcgttgttgaattttgtcacaggacttttctgtaactattgagataatcatgtggtttttgtcattgattctgtttatatgctggattacatttattgatttgcatatgttgaaccagccttgcatcccagggatgaagcccacttgatctggtggacaagctttttgatgtgctgctggattcggttagccagcatttttttgagggttttgcatggatgttcatcagggatattggtctaaaattctctttttttgttgtgtctctgccagactttggtatcaggatgatgctggcctcataaaatgagttagggaggattccctctttttctattgattggaatagtttcagaaggaatggtaccagctcctccttatatgtctggtagaattcggctgtgaatccatctggtcctggatttttttggttggtaggctattaattattgcctcaatttcagagcctgttattggtctattcagagattgaacttcttcctcgtttagtcttgggagggtgtgtgtgtccaggaatttatccatgtcttctagattttctagtttatttgcatagaggtgtttatagtattctctgatggtagtttgtatttctgtgggatcagtggtgatatcccctttatcattttttattgcatctatttgattcttctctcttttcttctttattagtcttgctagcggtctatcaattttattgatcttttcaaaaaaccagctcctggattcattgattttttgaaggcttttttgtgtctctatctccttcagttctgctctgatcttagttatttcttgccttctgctagcttttgaatatgtttgctcttgcttctctagttcttttaattgtgatgttagggtgtcaattttagatctttcctgctttctcttgtgggcatttagtgctataaatttccctctacacactgctttaaatgtgtcccagagagtctggtatgttgtgtctttgttctcattagtttcaaagaacatctttatgtctaccttcatttcgttatgtacccagtagtcattcaggagcaggttgctcagttttcatgtagttgagcagttttgagtgaatttattaatcctgagttctagtttgattgcactgtggtctgagagacagtttgttataatttctgttcttttacatttgctgaggagtgttttacttccgtcaattttggaataagtgtgatgtggtgctgagaagaatgtatattctgttgatttggggtggagagttctgtagatgtctgttaggtctgcttggtgcagagctaagttcaattcctggatatccttgttaactttctgtctctttgatctgtctaatgttgacagtggggtgttaaagtctcccattattattgtgtgggagtctaagtctctttgtaggtctctaaggacttgctttatgaatctgggtgctcctgtattgggtgcatatatatttaggatagttagctcttcttgttgaattgaattgatccctttaccattatgtaatggccttctttgtctcttttgatctttgttggtttaaagtctgttttatcagagactaggattgcaacccctgccttttgttgttttccatttgcttggtagatcttcctccatccctttattttgagcctatgtgtgtctctgcacgtgagatgggtttcctgaatacagcacactgatgggtcttgactttttatccaatttgccattctgtgtcttttaattggagcatttagcccatttacatttaaggttaatattgttatgtgtgaatttgatcctgtcattatgatgttagctggttattttgctcgttagttgatgcagttttttcctagcctcaatggtctttacaatttggcatgttttttcagtggctggtaccggttgttcctttccatgtttagtgcttctttcaggagctcttgtagggcaggcgtggtggtgacaaaatctctcagcatttgcttgtctgtaaaggattttatttctccttcacttatgaagcttagtttggctggatatgaaattctgggttgaaaattcttttctttaagaatgttgaatattggcccccactctcttctggcttgtagagtttctgccgagagatcagctgttagtccgatgggcttccctttgtgggtaacctgacctttctctctggctgcccttaacattttttccttcatttcaactttggtgaatctgacaattatgtgtcttggagttgctcttctcgaggagtatctttgtggcattctctgtatttcctgaatctgaatgttggcctgccttgctagattggggaagttctcctggatgatatcctgcagagtgttttccaacttggttccattctccctgtcactttcaggtacaccaatcagatatagatttggtcctttcacatagtcccatatttcttggaggctttgttcatttctttttattcttttttctctaaacttctcttcttgcttcatttcattcatttgatcttccatcactgataccctttcttccagttgatcgaatcagctactgaggcttgtgcattcatcacgtagttctcgtgccatggttttcagctccatcaggtcctttaaggacttctctgcattggttattctagttagccattcgtctaatttttttaaaggtttttaacttctttgccatgggttcgaaattcctcctttagcttggagtagtttgttcgtctgaagcctttttctctcaattcgtcaaagtcattctccgtctggctttgttccgttgctggtgaggagctgcgttcctttggaggaggagatgcactctgatgtttagagtttccagtttttctgctctgttttttccctgtctttgtggttttatctacctttggtctttgatgatggtgatgtacagatgggattttggtgtggatgtcttttttgtttgttagttttccttctaacagtcaggaccctcagctgccggtctgttggagtttgctggaggtccactccagaccctgtttgcctgggtattagcagcggaggctgcagaacagtggatattggtgaacagcaaatgttgctgcctgatcgttcctctggaagttttgtctcagaggagtacccggctgtgtgaggtgtcagtctgcccctccttgggggtgcctcccagttaggctactcgggggtcagggacccactttaggaggcagtctgtccattctcagatctcaggctgcatgctgggagaaccactgctgtcttccaagctgtcagacagggacttttaagtctgcagaagtttctgctgccttttgttcggctatgccgtgcccccagaggtggagtctacggaggcaggcagggctccttgagctgcggtgggctccacccagttcaagcttcccagccgctttgtttacctactcaagcctcggcaatggcgggtgcccctcccccagcctcgctgccgccttgcagtttgatctcagactgctgtgctagcaatgagcgaggatctgtgggagtaggaccctccgagccaagcgcaggatattatctcctggtgtgccgtttgctaagatcgttggaaaagtgcagtattagggtgggagtgacctgattttccaggtgccatctgtcaccgctttctttgactaggaaagggaattccctgaccccttgtgcttcccgggtgaggtgacgcctcgccctgctttggctcactgggtgcgctgcaccccctgtcctgcacccactgtccgacactccccagtgagatgaacccgatacctcagttagaaatgcagaaatcacccgtcttatgcgttgctcacactgggagctgtagactggagctgtccctattcggccatcttggctccacccccaccctttttttttttttttttttttttttggtaaaaacagagtctggctaggttgggcagtctggtcttgaactcttggcctctagcaatgttctcaccttcgcctcccaaagtgctagaattacagatgtgagccaccgcacccagcctaaaaattatgtttgaagttagctttattaaggtgtcacttatcttatgtaaaatttacctactttacatgtacaatgtgaattttaacaaacgtatgcagttatatagccacccatacagtgaagataggaactatttccatcacccaaaaaagtttctttctttccttttgcagtgaagttctctctcctacctctctggccctggtaaaccacctgtctgccttctatcactatagttttgccttttctagaacataggtagtctcttctgtgtatggatgtcttctttcacattgtagtgtactttggagactcaaaccatgttattacatgtatcagtaattcattccatcttcttgctgagtgtactccattgtttatatgttccagttgagggacattgtccttttgctttttagaaaactttttattgggccaggcacggtggctcacgcctgtaatcccagcactttgggaggctgaggcaggtgggtcacctgaggtcgggagttccagaccagtctgaccaacatggagaaacccgatccctactaaaaatacaaaattagctgggcgtggtggtatgtgtctataatcccagctactcaggaggctgaggcaggagaattacttgaacctgggaggcagaggttgcagtgagctgagattgtgccattgcactccagcctgggcaacaagggcaaaacttcgtttcaaaaagaaagtttttattttgaaacaattttagactgacttacagaataattataaagatagtagagagagttttcatataccctttccccagtttctcctgatgtttaacatctcacatggccatggtacaattatcaacatttaagaaattaatactggctgggcatggtggctcacgcctgtaatctcagcactttggggggccaaggctggcagatcacgaggtcaggagttcgagaccagcctggccaacatagtgaaaccccgtctctactaaaaatacaaaaaaattagctgagtttggtggcacgtgcctgtagtcccagctactcgggaggctgaggcaggagaatcgcttgaacccgggaggcgaaggttgcagtgagccgagaccacgccattgcactccagcctgggtgacagagtgagacttcatctcaaaaaagaaattaatattggagccaggtggtggtgcatgcctgtagtcccagctacttgggagaccaaggtgggaggatggcttgagccgtggagtttaagactagcttgagcaatatatcaagatcccatctctaaaataataataataataataaggccaggtacggtggctcacgcccataatcccagcactttgggaggctgaggcgggtggatcacgaggtcaggagatcgagaccatcctggctggcatggtgaaaccccatctctactaaaaatacaaaaaattagctggggtggtggcagacgcctgtagtcccagctacttaggaggctgaggcaggagaatggtgtgaacctgggaggcagagcttgcagtgagccgagatcatgccactgcactccagcctgggcgacagagcaagactctgtctcaaaaaaagaaaaaataataaaaatatactttattttaaaaagtaatattggtacaatactattatttaaactacagactttattcagattttcattgtcatttctctagtctcctacaatctgacaattccttagtctttctgtgtctttcatgactttgatgccttaatttttttttttaatttttaaacacttaaaaaatagagacaggatcttgccctgtcactctatttggagtggagtggtgcaatcatagctcattgtagcattgaactgctgggcttaagtgatcctcctgccttagcctcctgaatagctatgactataggagtgtgctgccgtgcctggctaatttttttcttattttttgtggagatgggatattgcagtgttacctaggctggtctcagaatgctgggctcaagtgatcctcccaccttgccctaccaaagtgctgggattacaggtgtgagccactgtgcctggcctgatgctttctaagagtacttgtttagatattttgtgtccctagatttgtctgatgattaggctgcagttatggatttttgggaagaataccgcagaggtgatgtgcccttctcatggtgtcctatcaggagctacctgatgtcagtatgtcctgttactggcaaagttaaccttaatcatttggttaaggtagcctctgccaggtttctccaccaagttactatttttccttttctgtactctgttaaggcaaattattgctttttaaattttgatgtacctcaatatgcatgggagatacatagctttgcagctccctcaatcttaattgtaataataatagtaataacaataactagcacttgctccgcctgcatagttctaaacacatgtgcccatttaatcctcatgacaccctgtgaagcaggcactttatgctcattttatagccgagaagactgaggtacagagtaccttgcccaaggcctaataactagtaagtgatggagccagatctttttttttttttttttttttttttgagacggagtcttgttctctcttgcccaggctagagtacagtgacatgatctcggctcactgcagcctccacatcccgggttcaagcaattctcctgtctcagccccccgagtagctgggactacaggcatgcaccaccacgcctggcttatttttgtattttcagtagagacagggtttgaccatgttggccaggctggtctcaaacacctgacctcaggtgatccacctacctctgcctcccagagtgctgggattacaggcatgagccactgcacccagcctggagccagctcttcacttcgcctgagttgaagggctgactttaacatgggccatatggttgtcgtcagagcttaggatggggacgctctcattctttgccagagaaaacaaatgcttcctatatttaatgcttctctcttgttttttctttaagacatttttttggtttgtttttccttccaggaatatatcttgtgtgactaaagattttagtaagctatatgtggcaatcataccatattaaaatcttggggagaaatccaagaaacttttggaaacattaaggatctatttttggtcttcttttcagaaataagactgaaggtagggcagaatattcagcatagaaaagtgctgtggtagaagaaatactcagtgagtgacactgcgcctttttctcctgggatgttatcagccacttctaccaggggtgtctctgtttgtctgtatgtgtctaaccctgccatgttcgcctttcttgaccacactaatgacttttctatgacacagtcaaatgtatctctgaatagcctgacttggggtaataactgtggtttacgtgatgacttggtctctgtgagccccctattctagtagcagtggagccactgaaggtcaggcagtgtgggtggacatttgtccatcttcctgtgactcactcagccgcctgcctttctgaggggaaagagctgcaggtgcaaagctctaatacatcccttcccttctctgtctaattctattatgtatattgcatatcccccaaatccttgaaattactcagctacgtgtcttattatatctagtctgccaagctgtctaggtatcagtacagtttttttctatgtctatatttattttccgaaaatgaaatcctactgtatttctttgtagcttcttttctcatttgacaatatagctgaagaagtttccatgtcatatggcatttatctacaatgttgtttgggtacctgcctattatcaatagcttggctatattatgattggtggggaatgtggcttgtttccctctatccctcttcagcatccaggacaggatgttcttgcagtcaccgaatgttaggaagctcagagtgctctcaggcatcatctgattaatcttttcttttgcacatagcatagttgaggataagtcagtgcaatttttaaaaataaagctttttttttttttaatgtctattgtatgtctggctggaagtgccagggtccacagcttaaacaagacactgcttatcttccaaagccttcccagagaggcatatacacacaaactgtaggatttatttccttaggaaggcaactgtttagaataagtctgatgctagcctacaatatatagaacactttacaaatgtagaaaattacttggggaattgataatagaggtcaggtttacaggtgtctggatctggcctcagaagtcagagggctaaggattagtctttttctcagatatggttttctacatattgattatagacaaaatataaagtagaagaaaatgtaaggaagaaagtgaaagtggcccatttctactgccagaaatagccactgttttattttggtataatttttcctttcctccctccgttctccttcctcttccatactgcaaatatgttcataatcctgcatttttcatgtaacactgtatcaaggatttttaaatgttacttacagaaaaggactttgctactttgataaggaaaaatatctagttttaatttgtattcccttaatattttagggaggattaacgttcgtttatgttgactgtctattcatgtttatccataattctacctttctataaaattggacatgttactaaagcaagcctctgatttcagatgtcctaaacgatgctatatttgatgaagatcatgatgagatggtgattgtgaaggacatagacatgttttccatgtgtgagcatcacttggttccatttgttggaaaggtaaggttctctttgttgtttcccagcaatttaaaacatagtgaaagtttttcaattagaataattatatttaaaatttttagctgccaattgctgatatctcaggtatttacaattatacatatatggttattctttattaacctgactaataacttgaaacttaaaaaacaaaaccaaagtagcagaaggctctcaggataagcctttcatgttaaataccaggttcataggttaaaataatgaggtttaagtagcatctctctctctctttttttttttttgtagctactacaggctctgaaaacctttaacctttatttatttattattagcatcccaatctagagatgccctttattttaacttgaataatgtttgatccaagatagatatgtatgtatggcatgtcatgagcaacaataattgcagaatttcttgtgacagaggttatggtatttgtggatttgtttccattcctttctatattaggaaaagtgaatctaatgcattagattcctcagcacctctgtgaatttcttttgtcagaaatgtttagtcctagtcttatgaaactttagatctaatctagtttacaggaaatccagaggctgaatggaacaaatccagaaggtggggcactctgctgaacagctggcctattctcttttcaatagagaatattatgggtgggagcactattttaggacaaaagggacttaagaggtataaccaaatgcagtgtaaatacaaatgtgtgactctccattggattcctgtttaaacaaaccaaaagtaaaacatttgagacaattggaggaatttaaatctgagttagttattagatgttgtctaggaatgactacttaacatacctttgagaacatgtggtatagaacaaagagttgtcccatttccctacccccatcataattttatttaattttgactctttattaataatctttaaacagaagacttacaagaagcagtgttatgaatacttatatacccatcaactaaagttaaagtgttaacatttgcttcatttttgtctttgttaaagtattgtatcttttcacttttttatggaaataatatatagatagaaaatgcataaaacttaagggtgttccttaccacttcagagatcaagaactagaataggctggcacggtggttcatgcctgtaatcccagcactttggaaggctgaggtaggtggattgcttgaacccaggagttcaagaccagcctgggcaacatggtgagaccccatctctaccaagataaaaataaaaattacctgggcatggtggtgcatgcctgtactgccagctactcgggaggctgagatgggaggatggcttgagtccaagaggcaggggttgcagtgagccgagattgcgccactatatcctagcctgggcaacagagccagactgccagaccctgtcaaacaaacaaacaaacaaacaacaacgaaacccccacaactacaatatgtgtagcatcctggaagctcacctcatttcttttctcttcttaatccctaatccatcctttgtatcagtttatcaacttataaccctatggattcgttttcttgtttttcaactatatgtaagtggaaagattctacgatatgtactctttgtgtctggcctctcttgttctacatagtcggattcattgatgtcattgcctgtcattgtagtttattttcattgttatatcttattccattgtacaaatataccacaatttatctattctgctcttggtggacctttgtattgttgcctcttttttttttttttttttttttgctattacaaacaatactgctgtcaatacttttttggagtacatgtgcatgcttttttttttttttttttttttttttgagacggagtctcgctctgtcgcccaggctagattgcagtggtgtgatctcggctcactgcaagctccacctcccgggttcacgccattctctcacctcagcctcctgagtagctgggactacaggcgcctgccaccatgctggctaattttgttgttgtatttttagtagagaaggggtttcacggtgttagccaggatggtcttgatctcctgacctcgtgatccgcccgccttggcctcccaaagtgctgggattacaggcgtgagccaccgcacctggccctaaaatattttcttacttatccacagcagcactatcacaaaattaacaataattcttaaatagtgtctaataacgaattcatatttaaatttctccaattgtctcaaatgtttactcttggtttgtttaaacaggaatccaagggagagtcacacatttgtatttacattgcatttggttatacctgttaagtcccttttgttctaaaatagtgctcccacccataacattctctactgaaaagaaaataggccagctgttcagcagagtgccccaccttccagatttgtttccttcagcctctggatttcctataaactagattagatctaaagtttcataagactagggctaaacatttctgataaaagtagttcgtaagggctgggcacggtggcttacgtcagtaatctcaacactttgggaggccaaggcaggtggtggatgtatcgctttgagctcaggagtttgagaccaacctaggcaacatggtaaaaccctgtctctaccaaaaaaaaaaaaaccaaccaaaaaaaaaaaaaacgaaaaccaatcaaccaaacagacaaacaaaaaaacaggcaaaaattagctagcatggtggcatgcacctgtggtctcagctactcgggagggtgaggttggagaatcgcttgaacccaggaggtcgaggctgcagtgagccgagatcacaccactgcactccagcctggcaagagagtgaatccgtgtccaaaaaaaaaaaaaaaaaaaaaaagagtagtgcttcataagggtgctgaagacttcatattatatcacatcagggccgagtgaggtggctcatgcctgtaatcccagcgacttgggaagtcaaggtgggaggatagcttcaggtcaatagttcaagaccagcaagtgagactgtctctaccacaaaataaatttttttttaaaattaattgggcatggtgggtgcatacctgtagtcctagctactttttgggagtctgaggcaggaagattgcttgagctcaggagtttcaggttacagtgaactatgatcatgccactgtaccccaacctgggtgacagaacaagaccttgtctctaaaaagaaaagaagagaaagcaatcagaaaacccagatacatcacatcagaagccatatcgtatctggaaatcctgcaattgataatgaaggaatctttgaaagggaatctattggtgagcaaattaggcacagaaagcctgtgacttgttcaagaggatagagagagttagtggcttggctgcagccagatccaaggcactgattctgtactcagcctgtcaccattttatcctgttactttctgctattacttcctcagtgtttgtgtttttgctacctttgttttaaaaatatattatttagtgattttttttttttttttgagacagtttcgctcttgttgcctaggctggagtgcagtggtgcgatctcggctcactgcaacctccgcctcccaggttcaagcaattcttctgcttcagcctctcgaatagctgggattacaggcacccgccaccacgcctggctaatttttgtatttttagtagagatggggtctcaccatgttggccaggctggtcttgaactcctgacctcaggcaatccacccaaaatgttggaattacaggtgtgagccaccactcctggcctatctagtgattttgtgaaatggacatttaaattacctaggatcttaagaccaaaaatagtataaacaatgaacaaattccgtgtctgcatggaaatgtaaaaatttcagacagcatagaagaccttggttcatgggaaagttttaactctctaatttttctttgaaatcctcaatgttcaggtgctattttactttttcctcctgccaaccaggaaggcaatgaggtggacttctcaaattcctaaagcatagtgccaatggatgggggaaaaaatcactaagtactactagatcaattatgtaaatagtaagtgaacaatgaaaacagtgttagcaaaccatgatgccgttgagtctctaattttatattcggttaattaattgcctacaagtgaccatttactctattaatcttttcagagaactaatgtttttcgtatgtagtatttggccccaaaagagtaacttttatatttgatattaattggtgccatttaagataacagaaatggcctggctgtatattgggtcctttaaaacttagttcttagggtgcaggttcttgccaagccatggtggtagcagtgccctttttctccagttaggaagatggggccgggcgtggtggctcacgcctgtaatcccaactctttgggaggccgaggcgggcagatcacaaggtcaggagatcgaaaccatcctggctaacacggtgaaacaccatctctactaaaaatacaaaaattagctgggtgtggtggcaggcgcctgtagtcccggctactcaggaggctaaggcaggggaattgcttgaaccttggaggcggagcttgcagtgagccaagactgggccactgtactccagcctgggcgacagagtgagactccatctcaaaaaaaaaaaaaaaaaaaaggaagatggtgcactctctagcagcttagaaaccaggaagccaagcacaaaagggtgtggagaccttctgtgctgcagggctttgcggtgggatcttaaggctgtgaggtgggatcttaaggctgctgtgatgtgtggaatggcaatacttatgcttacagtttttgccatttaaaggaggctttcctgtatacattttagtgttgctatgagatcatttgcctttccttgagaatgtttctcctccataaagaagaaactttcagatttgtgtcaagagttcaacttcacaggtaagtgtcagggccatgcaattgactcttgaacaacatgaatttgaactgcatgggtccacttagacatggctctttttcaagcaaacactgatcaaaaattctacagtatttgcaggatacaaaacctgtatagatggaggggcaacttttcatatatgcaggttctgcagggccgactgcgggacttgagtatgcaggatttgggtatacacaggggtcctggaagcaatctcccgcatttaccaacggacaactgtacaagtttgttatttgattaatagactcatacttatatattttgcttttactgcatttatgtaattttaaaaatacatatataaatgtttcattttctaagtcttaacagttccagatgttttcaaggtaatacattgtcgtgataaattacataaaagtgtactatattctttctatatttccttattttgtcacaaagaaggcactgtattttcactcagctaatgatttccgtctcttctctgaaggtccatattggttatcttcctaacaagcaagtccttggcctcagcaaacttgcgaggtaagtgtgactgtgcagtgaacaagaatacaggtttataggacctgccctcatctgctgagaatctatctcatcaggctttctctctttacctgtatggatctaacttggaagtcatattgcaacttaaagacttggagggtctgaaacacagatgccccttccttctcgtcccctactgcctgcttcctcttccacttcccaccctttcttccatagatacatacatcctggaagtctcagcccacctctttctctgcagagccttctctgactggagaggtcctgagcttaccttcagtccagccccatcctttaaggggggtttagctaacagtgaggggttggggaagaagctgggcaggggtctagctgcagtgctctgctgtcgaacttgttgtcaggcctgaggactcttctatccttgtcaaggggagtgctcaccttctttgctttcatacaacactgctttcagacttgtaatgaaacttccctgtgggatccccagcctcaaccctgccttgctctgcactggatgcctccaggcatatctcaggggtcctgcaggccagtccgttcatgtctaggttctttgtttctgcaaacacaagactgcctgccttggctttgcacagctttattctgatacagtgttcacgctcctcgctctcatttctctttcctgctacaatcttcttttctgttgtttatcctgtgggttcatgccttaaaaaattcccttactgccttttttatttgggttttaggagaggtgatgtacatacacgttcatctgtgtttaactggaagtcaacatgggggtttgtgttcagatatctctggtaggccccagccaccaatattttattgcccttaaatatccttgttgtttcttcgtataaagttagtgaattttgagtgatggaggaaatactgggaggtgtgtgtgtgtgtggagagagagagaaagttaagaacaagatgaaggggtcgggtaaagtgttcctactctttttttttttcaaaaataatcaagctaagtttgaataacttgaggttatagtgaccatatcataattgaaataaatgagtctcggccgggtgccgtctttcacacttgtaatcccagcactttgggaggctgaggcgggcggatcacttgaggtcaggagtttgagaccagcctcaccaacatggtgaaaccccatctctactaaaaatacaaagattagctgggcgtggtggcgcacacctgtaatcccagctaatcaggaggctgaggcaggagaattacttgaacccgggaggcagagcttgcagtgagccgagattgtgccattgcactccagcctgggcgatggagtaagaccctatctcaaaaaaataaaaataaaagaagaggaataaatgagtctctgtgaccagttgactgtgctgtggctctgatgtgttcctgtttctttatgcaggccctgggatttaacacagttgtgaaatggtggtcctgatatttctcaattctgtgttggaatctgtaaaaaaaaaactactccagcaatctgacaactgccctctaaagttgttcctgttactttgttttcacttccactttctcattcatttcctctggggatcaataagaaagtgggtagaagagacaaatttaacttccccagtttctgacctcattcctgctcagctattttgctattagatagggctgcttggcaccatgaaagaatattatatcatagctgtaattgcttcactggaataaggctcttagcacaaatccagaaacattctggctgcttgcgtgtgatccatccctggtggcagtgctgaaaagttgctgagaaaaagtgtgttggtagtgattgggagtaattaatcttactataatttttattaacgactcccttcccagtaacttaccctcaactaatgatgtattaaaccaatttcatgtcaactgtgagtaaaagtatctttactaaaattggttattcttatggttttataatatacagtctaagtaaaatcagcatgcttactgtgcaaacatagctgtaggcccagtcccctgggcctccctgtcagcaagattgctaaccctataccttgcccatatagaaattccagcactgctgatgcctataacagactgtccatatgtgaaaggtgtaatggatagtttcatagtgtaaaaaagcttggcagatcacattaggccttggtcttaatgtaacagccttctctgaaaaaccaactgttgatcatgattaacactttatgggaaatggactcttgagtgattcagtgagatcatacaataaatggcaacctggtggtagaaggaaataatcttagttatttcctttccaagtgaaaggaaaagatctcaaataattaagcttttatgaaacaatacaaaggagttgattattagcatggggatttgtccttagactaataggattaaaatttaagaataaaatggaacatgaagccaaagaaccaagtgtatgttgctttcaaatattttgcaaaaaatttgaataaagagtctattaaatagaaaagaagactaagattttatccaactacttattccttataagaagtaagaatatttagagaatgaagaggaataaaagctgaatgtcttagcaaaacttcactgctcattttaatcttatatatgaagtttgttatatgcttgcctttaaatgaatgacctttcagtgccagtgaagtcaaatatcaagcagtaaagccttaagtaacaagaaaatgccagaagtgagttgatctggctcaactctagtagaattctagaataaacttagtttgaatagaactttcttttgttgctgaaaagccattgaacatgtattcattttcttcccttagaaataactgagcctcggctgggtgaggtggctcatgcctgtaatctcagcactttgggaggccgaggtgggcagatcacttgaggtcaggagttccagaccagcctggccaacatggtgaaaccccatctctactaaaaataccaaaattagcagggcatggtagcatgcgcctgtaatcccagctacttcggaggctgagatggaagaatcgcttgaacctgggaggcggaggttgcagtgagccgagatttcaccactgcactccagtctcgtgacagagcaagactctgtgtcactaaaaataaataaataaataaataattgagtgaatgtacgaaatcttgaatttagagttgtagtatctcaggtagccatggctgacctgttgggtgggcactgtgccagctactgtggaggctaaagaagcaggacatggcagccaccctcaaggagagtgcacagggcaagactgcaagtgccatggaaatgcctgctgtagctccaagttcagaggagccatgatggctgtggcctggcaggtgaatagacctggaggtggagggatgagcagaattctaaatgggggagaagtttctctaggtatagttaatgcatgagcaaagaccagtcagagggtaggagcaaggcctattccagtggatgggaaccagattgactgatggaagtaagagtaagtgaggtgagtattagattacagagggagcagtatttttttttcttttttgactataaaagcaacataccatttaaatacaaatgagtgaataaagtgaaaacttttcttacctattttcattccccagagttagaactagagatttctttcactatccttctggaaaatatttatgcaagcacaaacataagatcatatcttatattctgtactacaacttgctttttaaaattttattttatttggtgtttttttgagatggagtcttgctttgtcggccaggctggagtgcagtggtgcgattttggctcactgcaacctctgcctcctgggttcaagtgattctcctgcctcagcctccccagtagctgggattactgatgtgcaccaccatgcctggctaatttttgtattttcagtaaagacagggtttctccatgttggccaagctggcctcgaactcctggcctcaagtgatcagcctgccttggcctcccaaatgctgggattacaggcatgagtcactgcacccggccagcttttttttttttttttttttttttgagacagggtctttctctgtcgcccaggctggagtgcagtggcactatctgggctcactgcagcctccacctcctgggttcaagcgattctcctgcctcagcctcctgagtagctgggattacaggcgtgtaccaccacgcatagctaatttttgtatttttagtagagatggggtttcaacatgttggcaagactggtcttgaactcctaacctcaggtgatctgctcaccccagcctcccaaagtgctgggattacgggagtgagccaccgcgcctggccctggccagctttttaaaaatttaaaataccttgaagttctttggacatcttttagtccaaaaagtccaagtttcttttcatagctacctaatatttctttgattaatacaattcatttaaccagtatttgctatagataagtacagtttgcagtttgagacttgccaaaaagtaaaaaagtaccctggtgaacaaattttattatctttgtgtgctttgaatctatctgaagtttaaattactagtatggaacttgatgggtaaagggtagccgaatttttgatattatgaaattgctctccaaagagaccatgccagtttatactctaataaatagatacataggtaaggggtggtgtatgtttctccacacttcggccaacacacttttcatcacacttttaaatctttgccaaactgataagtaaaaaatagtatctattttaatttgcatttccttaatagagcgaggttgaatctattcagacacttcctgttcttagctccagtattaatttttccactgagttatttgtctttttattcttggtttgcacaagctctgaatgttaaagcagtcaggtcaggtgctacagacaatgcttcccagctcgtcatttgtcttttgattttgctttatagtattatatttccataaagaagtttaaaacttttctgtagttcacaaacttcttttttttttggtacttgtatggccacattattatatttaaatctttgctccatctggagtgtattttggggtgaggagtgaggcagaacccatccactgctgcgtgtgctcactgcccggcaggtgcagcacccccacttcctgccttcctgccctccctgctgcaggtctttgctgggcctttcttatcttcctcctggagggaatgttaagctcctgcctcctccctgcctctcatctctgaggatccttcagtttgccctcatgagctgctgggatgttctttctaaagtgtggattggatcatgctgctcctttggtggctcaccacagcttttcagttaaagtccaaactccttatttagaataatttagaaaaagccaaagaacagaaatcacaaatctacaagttgaaaatcttgtatcataggttgctggggagtctgatatctaggaatgagacgatatgtaactaaaaatatgctttataaatctttacatcttgatgaatacgttttttaaaaagatggggagagaaaggaatggaccaagagtttgaaagcctgcatacattaataaccattagaaaaggtcaaattaatgatttgggggaaagtgcctggacccagtcagttttataagtgttctttcaagctttcaagtaaccacaaattttgcatgtgtataaataattcaagagcgtagagaaacctgtgaagtgtcaattaatttgatgaagctgcctattcttgataacaaagcctgataagcctagcattaaaaaaaaaaaatgataggcaaatctcactgattaatgtagttgtaagaatcttaaaatgtcaggctagtatagaagtactgttttcaacatgacccagggatgtttagtccaagaatgtaagaatggtttagattaaaactgacaactactgatgctgggtgtggtgaactagattaataatgcccctcttggcacagcgtatcaagatataatgcatatgtacattttacactttcgggaaagcatgaggcaattctagtgagaatccactggaattagcactaaagccacagtctggattctgtcctcccttttcccatcccaaatcaaggacgatacttacctattagcattattctaggaagagcaggaaaaagaaaaaggaactcatagacacattcataaagtttgggatcagaattagtactacctgtgtggccttcaaaaaatcaaatggaataatttagtttcaaacgaccccataaggccaggcatggtggatcatgcctataatctcagcactttgggaggccaaggcaggtgggtcacctgaggtcagcagtttgagaccagcctgaccagcatggtgaaaccccatctctactaaaaatacaaaaattagctgggcatggtggcacacgcctgtagtcccagctactcaggaggctgaggcaggagaattgcttgaacccgggaggtagaggttgcagtgagctgagatcgcaccattgcactccagcctgggcaagagcaaaaactctgtctcaaaaataaataaataaaaataaataaaacatccccatagaggtatccttgcaggcagctagcagaaactagtgcatgttctctgatgcacttttatccaggcttggaaggatacccaaagatgaagttccaaggagtaccatgagtcgagtcagacaaacacgatggaagagggcagatagtagaactatcagagataggatataaaacaagtacagtaagtcctcactttacgttgtcgatgggttcttggagactgcaacttgaagcgaaatgacttcaggcaaagtggcatataacagtcctggaataatgttgtttcattcaatgtcatttcagtatgattgagaaaaaaaaattccttgctgggacccactgtctgtgtggagtttgcatgttttctcccacatctgtgagtttcctccaggtgcttctgtttcctcccacatcccaaagatgcacacgttaggtgatttggcgtatctgatctgagtggtcccagtctgagtgagagtaggtggatgtgtgtgccctgtgatgggatagtgtcctgtccagggtcagttcctgccttgtaccctgaactgctgggaaaagctccagccacttgagaccttgaactggaataattggggaaatcaatatctttccattaatctttcttaaatgtatgtatcactcacatttattttagtgtttaatattagaagtgtttttgtgtttatttggaagtttgttgacgtttttgtgaccagaaatatgctatgggagcttaattcttattatatcaattagcctagggtaaaatttgttttgttctcagtgttttagtaaagtcatagattccgagaacctgtcgaccttgagcaaggacttactatatattaaaaaataggctgggtgcagtggctcacgcctgtaatctcagcactttgggaggccaaggcgggcagatcacctgaggtcagtagttcgagaccagcctggccaacatggtgaaacaccatctctactaaaaatacaaaaattactattgtgagtagtgctgcaataaacatatgtgtgcatgtgtctttatagcagcatgatttataatcctttggttatatacccagtaatgggatggctgggtcaaatggtatttctagttctagatccctgaggaatcgccacaccgtcttccacaatggttgaactagtttacagtcccaccaacagtgtaaaagtgttcctatttctccacatcctctccagcacctgttgtttcctgactttttaatgattgccattctaactggtgtgagatggtatctcattgtggttttgatttgcatttctctgatggccagtgatgaggagcattttttcgtgtgtctgttggctgcataaatgtcttcttttgagaagtgtctgttcatatccttcacccactttttgatggggttgtttgatattttcttgtaaatttgttaaagttctttgtagattctggatattagccctttgtcagatgggtagatcataaaaattttctcccattctgtaggttgcctgttcactgtgatggtagtttcttttgctgtgcagaagctctttagtttaattagatcccatttgtcaattttggcttttgttgccattgcttttggtgttttagtcatgaagtccttgcccatgcctatgtcctgaatggtattgtctaggttttcttctagggtttttatggttttaggtctaacatttaagtgtttaatccatctggaattaatttttgtataaggtgtaaggaagggatccagtttcagctttctacatatggctaggcagttttcccagcaccatttatgttttccccatttcttgtttttgtcatgtttgtcaaagatcagatggctgtagatgtgtggtattatttctgagggctctgttctgttccattggtctatatctctgttttggtaccagcaccatgctgttttggttactgtagccttgtagtatagtttgaagtcaggtagcgtgatgcctccagcacatgcacacgtatgtttattgtggcactattcacaatagcaaagacttggaaccaacccaaatgtccatcagtgatagactggattaagaaaatgtggcacttatacaccatggaatactatgcagccataacaaaagatgagttcatgtcctttgtagggacatggatgaagctggaaaccatcattctgagcaaactatcgcaaggacagaaaaccaaaccctgcatgttctcactcataggtgacaattgaacaatgagaacacttggacacagggtaggaaacacacaccggggcctgtcgtggggagcagggagggatagcattaggagatatacctaatgtaaatgatgagttaacgagtgcagcacaccaacgtggcacttacatacatatgtaacaaacctgcacgttgtgcacatgtaccctagaacttaaagtataataataattaaaaaaaaaaacaaattagctggatgtggtggcgggtgccgctaatcccagctacttgggaggctgaggcaggagaaatgcttgaacctgggaggcagaggttgcagtgagctgagattgtgccattgcactccagcctgggtgacaagagggagactctgtctcgggggaaaaaaaaaaaaaaaaaaagaacctacttatatataaaaaaattgacaaaggagatcgggcgtggtggctcacacctttaatcccagcactttgggaggccaaggcaggcggatcatgaggtcaggagttcaagaccggcctggccaacatggtgaaaccctgtctctactaaaaatacaaaaattagctgggtgtggtggcaggcacctgtaatcgcagctacttgggaacctgaggtagagaattgcttgaatgcgggaggtggaggttccaatgagctaagattgtgctgctgcactccagcctgggcaacagagcaagactccgtgccaaaaaacaaacaaaaaaaaattgacaaagggataagaaacttgcagaattagccaggcagattgggaagaggaggaaatataacttttagaaattaaaaaaatgaaactgaagtccagtatactcattaaatagattagacatagattaaatacggtgattgggaagaaaggtctaaagaaattgtgctgaatgcagcgcaaagacaggtagaaaatatgaatgagaatttaagaaacatggaagactgggagggtataatatgcccttaattgaaattcctggagataacagaggcaatgtgctagatgcaacgttagagaagataatggctaaaaaagtttctagaacacatgcaaaatatcggtcttcagaaagcctaataaattccaaataagtcaaattaaatccctacttggattaaaacatagtaaattgcagtatatacttataaaatatagttaatataaaagcagccaaagaaagaaatatcgattatctaaaaggcaacagcagttacactgaattggtttgccaacagcaatactgaagggcaagatagatatcagtgtcaaactagaattcggttcccagcaaatacctctcaacaaattatctttccagaatgacagcaaaataaagatttttttttttaatctagggaagctacatgacatgctgaaaagatgtgttaggtttcatatttactcctcacttgtaaaagaaaactaataaactagggtttagaaataataagctctcagagcacagagagcatgttcaccatataatcacatacatagcaggcactcagtaaaaatctatgggaatgttcctcctgccatgagagcagctgtctgccagaagcaggcaggcactgtgggtggtagtgaaatcctagaggcattcctattgaagtgtggagcaaaacatggttgcccagtgttaccactattgtccaatgtggcacctgaagttctactccagaaaaagaatggtgaatacgagaaggaaaacattactaactttaaaatcaatggcatctcctacatatataacaaactaatcacctgaaaaactatcagaagtaatatatacagaaatttgacctagtaagaaatatgacatacctcctatctaggagcttaaaaaccattcctttctaaggttttgttcaaaataccaatagaatatagctattaatatatttcttcaatatcctagtaactactgctgggataaaggagagctaggatggcttctgccctcagggagctctgggctgagtggtaaacggggtggcggacctgttactgactttgttggctgtaatgggtataaaggagcaagttgttggttctgagacgtgtagttgggggaagagccaggaaatgcctcatagggaggtgaaccataaattgaatctgaattcatgatcaaaaggccatgaatttaaagaaaaggtcctcagtgtgaatagtcatcttcaaatggataagtcacgtggtcatctttatatttcataaatagaatgaaagatgttgaaaggggaaaattctggctgggcacaggggctcacgcctgtaatcctagcattttgggagactgtggtgggcagatcacgaggtcagaagttcgagaccagcctggccaacatggtgaaaccctgtctctactaaaaatacaaaaattagccgagcatggtgacgggtgcctatagtcccagctactcaggaagctgaggcaggagaatcgcttgaacccaggaggcagaggttgcagtgagctgagatcatgccattgcactccagcctggatggcaagaacaagactccatctcaaaaaaaaaaaaaaaaagaggaaaatttatcacttgacagattgtgctataagttaagatcaggaggcttttatttcttgggggttaatcttactaagtgcttacataaacctatcttatgaagaggtgtctgaagaagtctaatcagttccaatctgattctcctaataggtttagttggtatagtagttgaccgtggtgtgctattaattaacaaagtctttttatttttaacttgaattttaagctctgataaaacaatatgattaatcagagcacttgagacatgatctaaaattgatgatttggaactttaaaattttgttactcatctctgtttttcctaagtgaacgtcacagttggagactcattaattctctttctggggacatcaggaagcaccactctgcagtggttggtggtcttctgtattagtaagggttccctagagggacagaactaataggagatatatatatatatataaaggggagtttattaagtattgacttacatgatcgcagggtcccacaataggctgtctgcaagcttgaggagcaaggagagccagtctgagtctcaaaactgaagaacttggagttcgatgtttgagggcaggaagcagccagcattggagaaagatgtaggctgggagtcaaggccactcttgccttttcatatatttctgcctgctttgtattcgctggcagctgatgagattgtgcccacccagattaagtgtgggtctgcctttcccagcccactgactcaaatgttaatctcctttggcaacaccctcacaggcatacccaggaacaatactttgcatccttcaatccaatcaagttgactttagactacatctccctgtggtacttgtatctttctgtcatcttgccataagctttatttcctcttgcagcccacttgcttcaacaatgtcctttttgttttatgaggaaggcttatcaattttacttcaaatgatttgtgattaactaaaacaattctttcttttctaggattgtagaaatctatagtagaagactacaaggtaagctttaaaaatctgtattaacagaaaacatttttcttttttttctttttttaaatttttatttttgagacagagtcttgctctgtcacccaggctggagtgcagtggtgcaatctcggctcactgcagcctcagccttccaagtagctgagattataagagtgcatcaccatgccttggctaatttttgtatttctagtagagacggggtttcaccatattgatcaggctggtctcgaacttccgacctcaggtgatctgcccaccttggcctcccaaagtgctgggattacaggcatgagccactgtgcctggctacagaaaacatttttcctacacaaaaagtattttttgttttattactagtgcgataagtatgacttataaaaatgtaaaacctcttaggactataaaaagtctactgtttcaagcttccagaagaaatcactgttgtatttgcacattccttcacattttcatgcatatacctgcattttcaaatcaatttatttggattatgtttaaacaaaaatgggctcattttatacataatcagccttgcttttttccctgctttttttcatttaacaaatcttaaacatttttgccacatccatgtaactatctcattcattctggtggctgtctagaatcctaccgtatatgccatggcttggcgtaacctataccagctctgatagatactggggggtttcatcagttttcaaatagatgcagtgctgcaatgaatattcctgtatgaattaaaagacaagtcattttattcaggacaggaactatattatttaggttaaattgttggttttcaacattgctctaagcacaattcaataattggactgcagcccctttgttaaccctgttgcaggctatttatttgctgcactactttacctccatggaggtgcttggtaaccagtactgtgttgttctaactgcacaggtatgagataattgctattctaattccttcccgcagtgatgctggagggcttcagggtgttctgagatctctttagccctgtacttcaggtgagggagttgaatccgggcctctctgtggcccagtcagcagacaaagcagtctggtaaaagctggtgtgtcttggctcttaaatctcacagaagtctgatttttaagatttcaaatgttctagagacagaaaaagcttccagctgtttgtgtcagactctcaaactgagctccttatcacatccacagttcaggagcgccttacaaaacaaattgctgtagcaatcacggaagccttgcggcctgctggagtcggggtagtggttgaagcaacgtaagtctgcatctgcctttagtaacgtcataatggtgcactagaagtgatcttgctatttagtgcttctcatattttgtagcaccaggtgatgccacacaactgatatgataactgtagatttccatccctgagcctaaagctcttttaccactttcatttactgttactgatataggaacagaatatgggagaagtattttttgagggtaggatggggcttgtggaggcatagggagttaaaagcacaggtgtagagatttgcataatcaatagccttttttttttttgagatggagcctcactctgtcgcccaggctggagtgcagtggtgcaatctcggctcactgcaacctccacctcccgggttcaagcgattctcctgcctcagcctcccgagtagctgggaccacaggtgtgtgtcaccatgcccggctaatttttgtatatttaatagagatggggtttcatcatgtcggccaggctggtctcgaactcctgacctcatgatccacccgtcacggcctcccaaagtgctaggattacaggcgtgagcccctgcgcccagctcaatcgccattttttaaaaatgctcaagacagggtcttgctctctcacccaggctggagtgcaatggtgtgatcttggctcactgcaacctctgcctcccaggttcaagcgattctcctgcctcagcctcccaaatagctgggattacaggtgcccgccaccacacccagctaattttcgtatttagtagagatgggatttcaccatgttggccaggctggggatctcaaactcctgacctcaagtgatctgcccacctcagcctcccaaaatactgagattactggcgtgagccaccacgccaatagccatttttatgtcttctcttgattttatgtcttctcttgatttcttctttagctctctgttgctccaagccgagtttttctaatattttgtcacacatttaaaaaataaagccaagaattggtacatttctttaagttaggatgagttaagagaattgcagctgttgtgtggacaaagttcatatgtgttctgtgacgtggtgtgaactctgttctatgtctggtatctaatgtcaccaggttgctcagacaggatctctggtcaccattatctgaattctgcctggtgacatcagtatacttgagcatttatctgaacacctaggctagcatagtgctgtcttggtcctgaaggcagagcaagtgagaattctgactttcttttgatctagaagttaagtaactctgtagaccttttatattactttcaccccagaagaaaattccatttttcccctttttggatgctttaaggatcaactactgataaaaataaaagttgcaagacaacttcaagaacaaaaagtttaggttgctgcaaagataattgcagtttttgccattatgttcaatagcaagaaccgcagttacttttgcatgaacctaatagataacatttgtgtaagaagggatatttcgatatacttggtaactgtgagctgagatttaatctttaggcctgcttttaaaaaccaaaccagcagctgtctactcctttaaacaacctgtgttgccttattttgtagacacatgtgtatggtaatgcgaggtgtacagaaaatgaacagcaaaactgtgaccagcacaatgttgggtgtgttccgggaggatccaaagactcgggaagagttcctgactctcattaggagctgagcttcattcagtgtgtgtgcgttggttgccgatcgtactgccagtagcattgtctgtctgtccggtcttgtttgtacattccattttcaattgttacagatgtgaactttattccttgtcactaattatatttaaaattatttctaggaagtcaaataaatataataaagggttgagccctctactttcttcttgccacctttttgtggcaatattaaagtgaactgctaatagtgtaagtacgtgcacaaaaccactgccagataaccagaggggcctgggaagggagaagaattagtgtatttttttcaaatagtacagtaatttgcctcataagcataggagcattgggaatgagagggaactgtgcccagtatactgttttttttcttcctccaataaaagtggtgtagtgccgaaagtgctaaaatatttagtgcggtattgctctgtgaattcaagttcaacagacttcactttggtcatgtttattaaaccaccagtgacatttaaaaatatatttttagcagtcgtaatgttagtcaccaagggaaggtggtggaatgtctatgtttttgattttactgtgagttaaaaaggcacatttctaccttctattgtttttaaattcaagaatagggaattagttcctggtgttgtttacgagtgtattctcgtgtcaacatacagggatttagacatttaactctctgtgccttgataagaatatcatttagagtgtagatacttttgcctttttaaaaaagccattattttatgagacttagtactcacactgcaaataactagtcagctcagttttaactttataggtttattgagtttcctttgtgtgatccatgtagatgcctcaaaatgtttcttcttcttcttttttttaatcttataagatatttttctaagtatttccagaaacatttgagagtgcccatcattttcaggtctgcagaaccatagcttccacgcacctgaacgagcacagaatgaactgacggtggaagacattatgagctgtgtccaacgttttaaccaaagcgtatcgtaccaacgatctgtgaaaatgcactggaagcttctggtcccggtttcctttgtggtctatgtgggtcttgtcctcattgtaactccgtatagatggtataggtattttaatcctggaagctgttgccttattaatgattatcttaaaatttcctccattggggcagcgtgggccaaattaaaacaaacaaaaccgcaactcctccacagaaacacaaacacagttattccatgaagtttagtatttggttgacatagtgctcttcaaattcatcccattaccctaaaagtaataactttgatgcttgctttaactttagtcccatctctgccactttgatgctatttgggttatgatggggcaagatggcagaggtattgggtttttttgtttttttccattcctctctacttctgtttcctagctttttctttctggagtttaagtacagtgatggttggcttgagtacctttttaaatctagcccagtataaacattagcctgcttaatatttagacatttataggtagaattctgagcactcaactcatgtttggcattttaaagtaaaaacaagtgtgacttcgaggaccaaagaaattgtcagctatacatttatctttatgaactcatttatattcctttttaatgactcgttgttctaacatttcctagaagtgttcttataaaggtctaatgtatccacaggctgttgtcttattagtaaatgcaaagtaatgactttgtctgttttactctagtctttagtacttcaaaattaccttttcatatccatgatcttgagtccatttgggggatttttaagaatttgatgtatttcaatacactgttcaaaattaaattgtttaattttatgtatgagtatgtatgttcctgaaggtggtcctatttaaattattaaactattgtaactttgttcttgtg

SEQ ID NO: 86 - DNA, 111327 bp, Homo sapiens
gagctgtggtgggctccacccagttcgagcttcccggctgctttggttacctaatcaagcctgggcaatggcaggcgcccctcccccagcctcgctgccgccttgcagtttgatctcagactgctgtgctagcaatcagcgagactccgtgggcgtaggaccctccgagccaggtaagggatgtaatctcctggtgcgccgttttttaagcctgtcggaaaagcgcagtattcgggtgggagtgacccgattttccaggtgccgtctgtcacccctttctttgactaggaaagggaactccctgaccccttgagcttcccgagtgaggcaatgcctcgtcctgcttcggctcgcgcacggtgcgcgcacccactgacctgcgcccactgtctggcactccctagtgagatgaacccggtacctcagatggaaatgcagaaatcacccgtcttctgcgtcgctcaacgctgggagctgtagaccggagctgttcctattcggctatcttggctcctccccctggctgtgggtttcttatagatggcttttattacattgaggtatgtcccttgtatgccgattttgctgagttttaatcataaagcgatgctggattttgtcaaatgcttttactgcatctattgagatgaccatgtgatttttgtttttaattctgtttatgtggtgtatcacatttattgacatatcacatttattggtatatgttaaactatccttgcatccctggtatgaaacccccttgattatggtgaattatctttttgatatgttgttggattcagttagctagtattttgttaaggattttagcatctatgttcatgagggatatcagtctgtagttttcttttttggttatgtcctttcctggttgtagtattagggtgattctggcttcatagaatgaattagggagggttccctctttgtcatgtggaatagtgtcaaaagggttggtaccaattcttctttgaatgtctggtggaattctgctgtggatccatctggtcctagacttttgttgttgttgttgttggtaatttaaaaattaccattttaatctcgctgcttgttattggtttgttcagggtatctaattcttcctgatttaagctaggagggttgtatttttccaggaatttatccatctcttctaggttttttagtttaaatgcaaaggtgttcatagtagccttgaatgatcttttgtatttttgtgatgtctgttgtaatatctcctgttttgtttcttattgagtttatttggattttctctcttcttttcttggttaatcttgctaacagcatatcaattttattcatattttcaaagaaccagctttgtgtttcatttatcttttttatttttttgtttcaatttcatttagttctgctctgatcttggttatttccttttgtctgctgggttttgtttgttcttgtttctctagttccttgaggtatgaccttagaatgtcagtttgtgctctttcagtctttttgatgtaggcatttaaggctatgaactttccccttagcccctcctttgctgtatcccagaggttttgataggttgtgtcactattattcagtttgaagaacttttaaatttccatcttgatttcatttttgactcaatgatcatttaggagcaggttatataatttccatgtatttgcatggttctgaaggttcctttggaatggatttccagttttattccactgtggtctgagagagtgcttgatataatttcaattttcttaaatttattgaggctcattttgtggcctattgtatggtctgtcttggagaaagttccatgcactactgaatagaatgtgtattctgcagttgttggttggaatgttctgtatatatctgttaagtccatttgttacaaggtatagtttaaatccattgtttctttgttgactttctttcttgatgacctgtctagtgctgtcagtggagtattgaagtcccccactattattgtgttgccgtctatctcatttcttacgttattagtaattattttataaatttgggagctccagtgttaggagcatatatgtttaggattgtgatgttttcctgttggacacggccttttaccattgtataatgtctctgtcttttttaactgccgttgctttaaagttggttttgtctgatataagatagctacccctgcttacttttggtgttcatttgcatgaaatatctttttctacccctttactttaaatgtatgcgagtccttatatgttagatgagtctcccgaaggcagcagatggttggttggtgatcttatccattctgctgttttgtatttttttaagtggagcatttagaccatttacattcagtgttaatattgagatgtgaagtaccattccattcctcatgctatttgttgcccatgtgccttggtttttttgtttttgcttttcaaattgtatttttgttttataggtcctgtgagctttatgctttaaagaggttccattttgatgtgtttccaggatttgattcaagatttagagctccttttagcagttcttgtagtggtgacttggtagtggtgaattttctcagcatttgtttgtatccttctttcatatatgacgcttatttttgctggatacagaattcttggctgataattgttttgatggaggaggctgaagatatggccccagtcctttctagcttgtagggtatctgctgttaatcctgataggttttcctttataggatacctggtatttttgtctcatgtttttctttataggttacctggtgatgtttttgcaatgaatttcccaggtgttctttgagcttcttgtatttggatgtctaggtttctagcaaggccagggaagttttccttgattattcccccaaatatgttttccaaacttttagatttctcttcttcctcaggaacaccaattattcttagatttggtcgtttaacataatcccagccttcttggaggctttgttcatattttcttattctttttcctttgtctttgttggattgggttaagtcaaagaccttgtcttcgagctctgaatttctttcttctacttgttcaattctattgctgagactttccagagcattttgcattactagaagtatgtccaatgtttcctgatgttttaactgttttttctttattctatctatttccttgaatatttctcccttcacttcttgtattgatttttggatttccttgcattgggcttcacctttctctggtgcctccctaattagcttaataactaacctcctgaattctttttcaggttaatcagggatttttttcttggtttggatccattgctggtgagctagtgtgattttttggggagtgtcaaagagccttgttttgtcatattaattaccagagttggttttctggttccttctcatttgggtaggttattattaagtcttagtagttttggtgagcctgggcccttggactgtgaacttcacaagtgcttcttagtctatcccttccctccccttaggtggaacagctagagtggctagagctgggtatccccctacccttaggtcagttaggctgtgagaaaaacctaagtaatttaagctctggtaaattagtttctcctgagggcaggccttgttaagaaaactagaatgttttggtatatttaaaaattacttttctcctaccccttttggaaggatgaagagatttttctccagtatttactgtaagaacttggttgagctcctggaggtaaaactcacaaaagtgtgttgtgttttgggtgccgcggtggggggtggcgcttgataactgggccccactggagtttttcatctctcagacttgtccacactgagcctccagcaatttgtcaattacagttcagggcttccctactcctggcactggttcttgcagaggtttctgcttgtgggtttctgctctgttaagttgtgattgtttctatttgcttgtctgtctctctaattttgggggcagtagtttgccctgtgacttcacttctccaaaagacctaataagagttgctgaattttttttttttttttttttttttttttttttgagatggagtctcacattgttgcctgggctggagtgcagtggcacgatctcggctcccaggttcacgtggttctcctgcctcagcctcccaggtagccgggattacaggtgcccaccaccatgcccagataattttttatatttttagtagagacggggttttaccatgttggccagactggtctcaaactcctgacctcatgatccgcctgcctcaacctcccaaactgctgggattacaggcgtgagccaccacacccggctgagttgttgattttttagtttgttcagctttttacttgttagaatgaagtgatgactgccgacctccttatgtgccagactagaaactgggagtctcctatttagtcgtccttaaaaattgtaagctggacattgttggtgatgcattgtagcaattctgatttctgttacctgagagtgttgatttttgttttcactggcagctaatcagtagtcagttcccttgaacttataaagccttagttttacactttgttaggacgagtctttcagatttttcccttgatcttaggcagatccctcagtcctgggacacagtctctactcctagcatgaactgtttgtcaaagctcatgtcactgccctgtactggcaatgaagaataatcaaattctattccaaactgtaggcaaagacaacaactattaatctctactgatcaacttgactctcagccacaggtggaaaaccagtaataaaaaagggttgtctaaaggctttgagatctacccattctcctaaatatttcaaattttatttctggccagattggaccagaaggctgaatccttaggtggtatggctttgcccctatagacttccttgtattgagttgcatgttggcatctgccctcatcatatagtaaaggatgtgataagaagtcgtcagtggaaccatcctaatctcagttttatttttcataagaatgccagtgagcattccatcctacagggtcccctgtaggagaaggagccactggaagaatttctctcagattttagtgccagaaaaagctctgcttctcctgagcaactgataagtttctatctcattaatgtttggctgctgctaagctcagaagcaaagtcagtgtttaggaactcttgtaattttgagggctatcttttgctttaattccctttgtttatttaattatgtcatatttatttccatcagacccttaactgctttttctatagcaaagccaaaaaaaaaaaaaaaaagtcatcggaatcataaagagccaaggaagctgctatcattccaaacatttttgtccttcctcttctggatggctttcacagccagattcgaatccacgtaagactgtcatcttcaacccaaagtgaaatgactcacctgcctttctacttgattcaccaattggtagtcaagaaatcgattttcaaaaaaatcaaatttactcctaaagggcagaggttaaagatactttaaaaaattatatcctggctggtgtggtggctcacgcctgtaatcccagcactttgggaggccgaagtgggcagatcatgaggttaggagttcgagaccagcctggccaacagaccagcctggccaatatggtgaaacgccatctctactaaaaatacaaaaattagccgagcgtggtggcaggtgcctgtgatcccagctactcaggaggctgaggcaggagaattgcttgaacctgggaggcagaggttgcagtgagctgaagattgtgccattgcactccagcctgggtgacagagcgagactccaacttgaaaaaataattatatcctgattttgtgtcaataaagatacttgaatgaatgttctactggccctgaaggcgagttcaaggagaacttccaaatcattttagtgtggctgcagtggttcctgctgataatcccagcattttgggaggctgggacaggaggattgcttgaggccaggagtttgagaccagcttgaggaacatagcgggaccctgtctctggaaaaaaaaaaaaaaagttgggcgtggtggtgcatgcctgtagccccatctacttgggaggctgaagtgggaggatcacttgagcccaaaaaggctgaagctgcagtgagctaggatcacgctactgcattccagcctgggcaacgaagccagaccctgcctcaaaaaacaaaaacagaaatgaaaaaagcaaaacattttggaccacaggatcatcactggaaggagcaaatagattctcaaggtaatatttctttgacagagagagccatcattggaacatttggttatctggtatgtttgaattaatgtagaatcactcgcagctctcgtctttacaacacagggcaactgtcagggttagcgaggcatttgttgtcattccctctctaggtggagccagggcgtgtgatgggagcacggggcctgagctgcagcataagtttcctctgattttcaacctggaagacgataccgcagaagctgtgcccctagaaagaggtggtgcggagtaccaggctgtgctgcccgaggtcagaaaggttcttgcagacgtcctccaagacattgccaacgacaacatctccagcgcagattacactcaggacccttcagtaactccctgctgtaatccctaccaaattgcctgccgctgtcaagccgcataacagaccaatttttattccacgaggaggagtacctggaaattaggcaagtttgcttccaaatttcatttttaccctctttacaaacacacgctttagtttagtcttggagtttagttttggagttagccttgcatatcccttctgtatcctgtccctcctccacgccgacccgagagcagctgagctgcgctggctctgggcagggagtgtgccttaatgggaagcacacgggctttggagtcaggcacaggtgccagctccagcttttgaacttgggcaattgtttaacctaacctgcaagttgattttgagggttaaataaaggcatacatgaaaatgcctggcaaattacctgacacagagcagacattcaatacattttagtttccttgtttctctggttcccagtttctctggtcattttggtgtaaatccattctaattagtatttagggcagagcttctctctcttttctctttttttccttccacaaaccagtgtactcactggtctccatctttaatatgcaaacaaatcacctgggatcttgtgagaatccggattccgtctcagtagggctcgagtagatcctgaaatcctacatttctatcaaacaatgccttgaggagcacagatttagaccaaagttaggtcgttttccagatctcagagcagacgagtccatggataagtctgtggcccaatccccttcctctccttttaagggtgaaatgactgcatttaaaagaagttaaagagttcctcctgtcccctataaccacaaggaaacaaaaaaatatataaaaacctcaaaaatgcattgccatgattttattattagtgtccaaaatgggactcccaagtaataaatgatttattccagccacagccaaaaaagactttgcctggctaaaagagtctctctctaagtatgtaatatacaagaaatacaattcaaagagatgttcctataagtacattttttacacggcatatatttaaaaaggaggccccttttaatataaaattccggttatataccaatatggttaattagcatttacactatagtttgaacgtattttaaatagcatgatgtgtatacaatgtctcccgcgcccattggcaaccagggtcgtgggaagcttggtgaggagttaaccaggtcctgtggtttaagcagtggagcacccgggattcctgcccccctttctgctcacacaattgcactccattcttccgccttccttgttttctccaaaaccacctgataggggggatgtcctgatttctgaggtgtgcttctcatcatgactgcttcgttttgcccttctgatttccacggcacaagattatctaccaaaatcaaaacagaatggccttactcttctcaggaagaggctggtaggcaggtgcattatcaacaggtctgtgcccatgcagagtgagcagggagaggctgggcactgtggaatttttctgtctgaactcgctcatggccacagaatggtcacccagcttatttaggtgtagacaagtatgacacagttctagaaaatactgactataaaaatgtctctgtgtgtgtgtgtatgtatttatatgtatatgtatatatttttaaaaggctcatcttacttgtaaacatggactgctcaatcactattaaaaagtcagtttaggctgggcgcggtggctcacgcctgtaatcccagaactttgggaggctgaggtgggtggatcactaggtcaggagtttgagaccagcctggccaacatggtgaaaccccatcgctactaaaaaatacaaaaattagccgggcatggtggcgctcacctgtaatcccagctactcgggaggctgaggcaggagagaatcgcttgaaccggggaggtggaggctgcagtgagccgagatcgcaccactgcactccagcctgggcgatggagcaagactccatctcaaaaaaaaaaaagtcagtttaggctgggcgcagtggctcacacctgtaatcccagcactttaggaggctgaggggggtgatcacctgaggtcaggagtttgagaccagcctggccaacatggtgaaatcctgtctctactaaaaatacaaaatttagctgggcatggtagcatgcctgaaaccccagctacttgggaggctgaggcactagaatcacttgaacctaggaggtggaggttgcagtgagtggagatcacgccaacacattctagcctgagggacagagtgagactctatcatctcaaaaaaaaaaaaaaaaaaaaaaaagggaaggtcagtttatacccttgggcctgatttcctgactcttgctcacaagattgggactagtctcacaaaatacagagacttgtacaggttggcttgttcctgaaacaaaagcttctcatcctcccgaatgtagcagctttctaaggcaccagaaatgatcaagtctcttttctttcactgctctcagagcaaaagtaaatcccaaggaggcaagcgtgatcctacgcagggaagtgtcagtatgtgttctgaaaagatcactagtgatgacccgcgttcttaaggcagcggctcacagagctcctgtagcagactactcaggcaagcctatgtttgttcgtcactacaagagaggcgattttaaccaagctgagactccaagagccttttgtggtcctagaagattttaaggaatgtgagtaaagatgtgaattctgcacagagatttgcaataggcatgacaattcagaataaggagacagagaggaagttccctagcatccctcgctgaacatttctgccaattcaggcatgactgagatgggccatattgatagagcatcccaggagcatgcatgcctctggtccttacatggtgagatggagaagcctgcctgctactgagacagtgccttagtgggagcactgcccctcatcaccatctacctgcaggctggagggcagactgagaggttggtggctgccacgacacagccctgcacacaggggctgcttgacactcacaagggtctaacacctgttctagggaccttgttcagtgaccactctcactggcaggaagtatttcttgcgtataaataagaattcctgatgcaatttcaaccaactttcactcatttggtccttaggagggagaagaaacaactggctcatgcccagcttcctggcactgaatgggcacacaggcctcaggacaaactttcttactggttcttcaattaagcacctccccttttcctttttaccccaaataaatgatctgcacaaggtacctattattttatacaggttctttggcaaggaactacctcctagatactaatatccacattaccccaattctgtaactataagaggttgcaaggcttactgcgattacaattaagaatctaataatattttatagtagttacagacttttaccaaaattagtgaaacggaacctagtgagtgtctggatgtggtaaaccctgacagagtagaatggtcacatttgtccccacggtgtctgacctagagtgctctggatcctggaagcctcgacttcaggtaaataaccaccgcctcttgagggtgcagaagaacgccctttaaggccagttggggccatgagaacccaaaggtaaaacaactggtttatagttaggcagcatgccaacagaggttttgaagtttataattagtatttttaagaacaactgctctccgccactgagatataaacttcacttgccagccacgtctctgacaacctgcctattgaaagccagaaatgtaaaagctcacgctgcgaccgacccgcagagccgatgtgggaaatcacaaaacaacagccccagccctgcatgcagggccccaccgcagctttgttttctaagccaaatgtgctcactagagggttccacggatctgcgggagaaagaagccagacctgcactccatccttttacaattggaagctcaatggacacaaaacaatgatcaggagaagtttccataacaaagcctaatggacattgtttcagtgcccaagtggcagctcctctctggctctaggagctgatgctccaagtcttggcccaaacactacttccggccgggtgcggcggttcacgcctgtaatcctagcactttgggaggccgagacgagtggatcacttgaggtcaggagtttgagaccagcgtgaccaacatggtgaaaccccgtctctactaaaaatacaaaatattagttgggcatggtggcgcacatctgtaattgcagctactcgggaggctgaggcaggagaattgcttgaacccaggaggcagaggctgcagcgagccgagatcacaccactgcactccagcctgggtgacagagcaagactccgtctcaaaaacaaaacaaaacaaatcagtacttccatctcgaaatgatttcaggttgactatctgggatgttttgactgaagctcacaagagcggtctatatgttactccagatgggagcctgaagaatcagcagttaaggaagccccagcaggctctcaggagggaatcttgtcttcagttccaggtgatggaagaagccacgcccagcactcagccagccccgagggccctagctgtgggaacaggctgagcaggttgctgggaaacccagctaaaggtgctcgggcaagctcctgccctgcacctgctgccctccacagagcacacaattgcttttcttttctttttgagatagagtctcactctttcacctaggctggagtgcagtggcacaatcagagctcactgcagcctcgacctcccaggctcaggtgatcctcccatctcagcgtcccgaatagctgggactacaggcacgtgacaccacacccggctaattttttcttttcttttttttttttttttttggtggagatggggttttgctgtgttgcccaggctggtctctaactcctgggctcaagcaatcctccagcctcggcctcccaaagtgctgggattacaggtgtgagccaccgcacccggccacttgtttcttaatgagtgtctgcaactgctggggaggtgcgggtctgccggccagagctgcaggtaagtgagggtcaagctggttcacagagtgcagcaactcagctcagagtcctgaacacacagcccagccctctgaaaccatcccctccagcacaaggaaggcagcattctgcaaacgcatccatgggagcctcaggaaaataagttttagacaagtcacgtgttcctaccttccaggcagcaaagtcagtgctacagaagcaaagtaagggatcgcaggcctctggctggagggaggccaccaagactccctggattagtattcggtgactctaatgccatcagggtttagctcgacacctaaagcctactctgtaggattcgaagcacacagtacaacaaatatcctatggctttccaaatactagagcagagaattagttgttatagattagaaaacagggaaagggactctgcctctcgtatgaggcgaaggtttccttctaagcacacagactgagccgcccagttacgggttcctaatgctcacaggaggaaactcattctcatcatcaagacacactggtcccgtcgcaaactcatgttcaggaataacttctcctcgcagcgccccgccgtcctcagaataacctggaaaccaagaaagagacatgaaacaagcactggggatctgcttttatgccatgacctggcgggtggggagcgggggctcaaataaagggcaaaggaagcaaaggggctgtctgtcttccccctggaggtactgtgcctaggacaagtcataatcctcaccatctgccatctttaagcctgacctgcctttccacttcagatgcctgaggcatcctacctctttgaatttttctttgttgaggtagggtctcagtatgttgcccaggctggtctcgaactcctgagcctaagggatccttctgcctcaatttaacttcctgagtggctaggactacaggctctttggaaattttagtttagtttttattttttgaaacagagtctcactctttcacccaggctggagtgcagtggtatgatctcagctcactgcaatctccgcctctctggttcaagcaattctcctgcctcagcctccggagtagctgggattgcaagtgtgtgccaacatgcccagctaatttttctattttttaagtagagatggggtttcaccatgttggctaggctggtctcaaacccctggcctccagtgatccgctggcctcagcctcccaaagtgctgggattacaggtgtgagccaatgtgcctggcctcattggaatttttgaagaggcaaagggttaacaccacttgttaggaaaaagaccgtatcgtgtgatgccttgccaggttgagggtcccaggtttaaaggctattaccatggcctcacctgtgagaaaataaaaaattcaaggagagcactccacccccaggtaacagtgaagggggaaggggagggagggcactccacccccaggtaacagtgaagggggaaggggagggagcgtgcagggagaaggggagggaggtcactgttggagatgctcccctgttggccccgtgtccacccacctggcaccgtggaggctgaagatgcacttggtctggctacggtcgctgcataagactgaggtaaggaaggtctgaggtcattttctttattctcttctgttgttcctgagccaagcaagctacttgtgacaatcaagaggaggtgaaagaaaaaagaaatcatcatatatctaggacaccttccaaaggaaaagcatgaagaagcctgtgctcagctctgtgggttatttatttatttttgaggcagggtcttgctctattgcccaggctggagtgcagtggcgcaatctcggctcactgcaacctccgcctcctgggttcaagcgattctcctgcctcagcctcccgagtagctgcgactacaggcacccaccacagcgcctggctaatttttgtatttttagtagagactgggtttcaccatgttggccaggctggtctcgaactcctgacctcaggtgatccgcccgccaactctgtgggtttaaattgtagacctacccacacgctgctgggccaggatgagctgaagtgacctgcaactgccaggggcagtcacacaccgtcaaaatggcctctttctcttacattggctagacaaagattagtcctctgctcttcccagtacacacaggtgaggacatgctagcaaggagagcagccatcggtggggggcggtggcagctctggtgccctggccacagcaggagagctcagtctgtgcctgttcacagaaggcatgagtgcttttcttttgttttcttttcttttttgagacagggtctcactctgttgcccaggctgcagtgcagtggtgtgaccacagcttactgcagtcttgaccttcctgggctcaggtgatccccccacctctgcctcccaagtagctgggactacaaggcatgtaccaccatgcctggctaatttttatattttttctttttgtaaggatggggtttcaccatgtttctcaggctggtctcaaactcctgagctcaagccatccgccctccttggcctcccaaagtattgggattacaggcgtgagtcaacatgactggtagagcacttttcaattccatgcagggaataggtttttttttttttttattttgagacagggtctcactctgttgtccaggctggagtgcaatggtgtgatcatggctcactgcctcaacctctccaggctcaggtgattctcccacctcagcctcctgagtagctgggactacaggtgtgtgccaccacaaccggctaatttttgtatttgtttttggtatagatggggtttcaccatgttgcccaggctggtcttgaacacctggactcaagccatccacccgcttcggcctcccaaagtgccgggattacaggtgtgagccgccacacctggtggcagggaatatttttgaacacccactgtgagctcagggctgtgttaggagcataggctgagggggagaccatcttgtgtgttattaatcctggcacttttccagatgattaccacatgctgagggcacctgacacagagcccggtgcagagcacttgcccactagaggtttgccactgagactgccagtgaagaacaaatcaatgcaagggcactgaagcttgtcgttcttggcgaagggacaactctacacgaccagctctcgaaaggctgtcttttgaaaagcagtctcttcacctgtgggttttgattaagacacactctcctccatcctgaggatccaaattgtacatataaaggtgtccactggatgacgcaactagcagccgtggcaacttctggatcctaagggccaaggaaaacataaaccgtgatgacaacgaagatgggcgatggattcgcttccaatgacaaagcccccctcaccctagctgtcaccagattctgcctttgacaaacccttagcccactgatctggtctgggcttctggctattcctttgcattctggccttgggatctactttcaggattatttcttgtctttgaacgtgacagtgtggatgaggcaagtgagtgtagatgctgcgaccctgcgagaagcaatagctagtgaacacattagctccctacatgggacgcagtctccctctgacatgtgtctctgcccttaaccaagacagaaagggggtaaatggaggattggcttactgtctttgctggttagttttgtgaaattttaaaaatgttcaacttttgaataaactcctttaaacttcttaaaacatctgtcagccccataggagtccgaacctagaaaacagatctggaggctttttacataattacataaaaataagaattgtttttaagacagtgtcattataaccagaaggctaaaattcccatgccaacttctggctgccccctgagaatccgtattgaagtcagataggaaaagcaggggtttgattccgctcacccttcctttggggcaagttttctttttcttttttgagatggagtcttgctctgtcgcccaggctggagtgcagtggcatgatctcggctcactgcaacctccgcctcctgggttcaagcgattctcctgccccaacctcccaagtagctgggactacaggcacgcaccaccatacccggctaatttttgtatttttagtagagacgggatttcaccacgttggccaggctggtctcaaactcctgacctcagatgatctgcctgccttggcctcccaaggttccgggattacagatgtaagccaccgtgcccagcctggggcaagttttctttttttcttttcaggtttggggatttttgtgctttggaaaaatacattgacgaaagtgtggtcttgttcagagtgggtgtcattgtacgtacgttgagagggtacagatgttcctctgtccggagaagttcaagcgtgcagtggcaaaagccctgtcctgatgcatcatgtctgacacctgggtagggaggtagttggtagcagccataaacatctttcccatgtagccactccaggtcgaaggctcttctggtcgactagggagtaatgcacaggcaacgatgggactgggctgcaggccccacacgcacccaggaatctccacacccaagcgtcattagccacactccccgcagcagggagagactgtgccttagcataatgttctgcccactgagaacaatccaggacgtattattctggcaataactaaagagcatcaagggcttgtttgttcttcagaagagccattgtaaagctgttaaaaggttcccaatgctactgctttcccctattaaagaaggcttatctgatgactagtctgattcctagatttccagaagagagttagggtagagagtgagatggacttgatatccaggtaccattaaataagcttgggactgtgccgggctcatggaagaacagacagatctcaacgtgaaggcctcctgagccagactgagtgggtagcaaacctccgggcaagacactttgggtggtgtttgattgtagataaccctggagtcacccaggtacccagcatgtgtaatgatggagatcatgcaaagggacctgggatgtcgcctacagtcatggaacttcatcccaaggcctctgccagacaaagggggtgactgttctgttggtgagagacaacccccagctctgccccacacagagggtggcacattgagaaccaaggttgccatatgagttcccaggagcaggcaactgctgagaggctgcttgtctgcaggattaggtcctggtgggaagctcgccctgcagctcagagctctgggaggtattctttactatgctaccaatgggctagggggtctttggacaaacctctctgggccttcatgttctcatctgaaagtgactatgctaggtgcactgctagggttctgtgatccgaagcatcctgagacatccttgtactgtctgtcccacagccctgtgctccgggctggggtttacaaagaggtgtacgatccagaccctgcattccagattgagagagcacgggtgtatacaaagaaaaaccacgtgagcagttaatatgcggtgctgcacagatggtccaggcaggagctagtccaggaccacagaggaagggagaggcggatgaggttccttaacgtttccgtgtccagatttcctcatttgggaaacaggaatcatcatcacaacctccctgacagggttgctgggagaactaaggatgctggggactgagcatggagcccggcacgtggcgcatactgttttatgggatggtgtctctgtggctggaggaaatgaggaggttctgggggtggtggctgctgggctctgcagcaggtctgactcagggggacgggaggagctgggacttcattcccaaggtcaaaggggaataaaggtgtctgaggaggaggtgtcatgttcaaagggacattttcagaagattaatcagcaagatgatataggatggactggtattggttgaaagagactggaaagtcagaccaaatgtaagagtaacggctggaccagcacgaggtgctaaagacacgttcaagggccctggccagcgaagcagggctgaagaggcacgtgtgagccgtaaccgccggggacatatgaacacccgtggacaggttgagcggagaacccagaacagcttggaggttctgctcctggtcacctgtgctcacagacagaaacgggagagcctggagtggaaaatcaatctctgataataatccccagtggaggcggggctgcagcagcaattgcgatcactcactcgtggaaccttggggttgaacggcatcttaacagctcagccgccctctagtgctcaaacccatgacaacagatgatgaattaaggctccaaaaaagatcagggcttaagaagctgtctgaaaagtgaaagaaaatcctaaaaagtggatataatctccagggaaagagtaaaaagaacctcaggacaaacaatgagctttgggttacacctgtgcagattgggggttggaaagttctggaaagatgaaggagcgagaagggagccgcccccagtgtttcatacaccactgggggtggggggagacaaggattctagagatgaggggacgtcagtcccatggctgtgatatgtgacatggctcaggtgacctcaggcagcgtgggcttgctttaatcacacatgcctttaaaaatagctttctccaactggtggcagaaaaagatggcagaagggcaagtcagagaaatcttggcacctctctttcagccttgtgtcatgctgagaagaagacccagtcctgccattctgggctgcagaactgtgaaatcataaatgtggctgtttgcctatagtcccagcactttgggaggttgaggcgggtggatcatgaggtccgcatgtgtcagcattgataaggtgcccggcctctgtcatgtatgtgttagcatgtatcagcgtgataaggtgcccggcctctgttacgtatgtgttagcatgtatcagcgtgatatggtgcccagcctctacaccttcctcttctgaaactccatccaagggtaccagcaaccaactccccagatacagtaggctttctgtcctgatcctgcctttctctgcaggttggggtaacgttttcaaagcgctctttctctagaatccttgccccccaccgtggggtatgaaacactgggggctgctcctttctcactcctccatctttccagaattttccaacccccattctgcacaggtgtaactcaaagctcattgtctgccctgaagttctttttactctttccctagagattttatccattttttaggcttttctttcacttttcagacagcttcttaagccctgagaaattgcaggtgcttcccaagcgctcagtggtgctgctggcaacaatgataaataaatatattgttatatttacagctatatcagctaacacttcttagtgcttcctatgtgccaggcacgatgctgaacactttagatctgcagactcatttaatactactgttatgttcattttgcagatgaggaaactgaaggacacagatctaaattatcttcccgggatctctgggctcctaagaggcagagccaggacgtgaactcacgtgggtggctcccagttttttgcttttgtgcatcatgcctccaaagttttgctaacacacactccatcacttaggtgaagtcccaagtgaagccaagattgggtgttcagaaagaaaagagatcattcatgccagtagaagagcctaggcctgactcctttcgtttaatgagcatttggtgccccgcggagtacttgcctgttggtgacctgttccagcttgaagatgtgtaccgtctcggtgttactggaggcgcagaggaattgtgaatccatactgaacactagagagctgattgtcacatacctacaagcacagcaacacatgggtcagtgagcaagagaaatgggagttatggccttataactcagagatcagctttataagaaaatcagatgtatcctgaagagcctaggtagacccagatcccttaaacactgtggtgctcatatttagaaattaatgtcagaaagattcacaaagggtcatagttttttttttttttttttttttttttttttttttttttgagacagagtctctcgctctgttgcccaggctggagtacggtggcttgatctcaactcactgcaacctctacctcctgggttcaagcgattctcctgcctcagcctcccaagtagctgggattacaggcacacaccaccacacccagctaatttttgtatttttagtagagacggtgtttcaccatgttggccaggctggtcctcaggtgatctgcctgccttggcctcccagagtgctgggattacagacgtgagccaccgcgcccggcccatagtcttatttatgtgagaagaaacaaggtatagccctgcctctgtcagcagaagggaggaactgtgccttcctggcatcttggaatcttccagttgctctgtgcactgatctggctgcaaacctacatccgataagatcccaaacagtcacactttacatcgtcctttatttccatggaaggaaatcagaaattatttttggattgtgactccctggctctctcatttctcctgtgccggccgcccacacacacatcaaaaagggactctcacggctgaactgtgttaaaacagcatctcggctttcagttttgctgagccctaagtaaagcctgggagtcaattacctgggagagtagttacacttcctccaggtgagtggagggcacagagccactctctgtcctctccctagacagctgccagcggtccctgcgggacttctgcggggactttaaaatgggtttgacattgaacacagaccttttcatccctctccggaactcatagagcttttgcccatcagggacagagaacacccggatgactgtgccctggaaaagaaagcaggtggacatttcataaccattagtggctttacacagagatgtccctttagagaggagtttgttttattggttttgaacatctgtctctgaggaggaagaacaccacgttgagcatagaggcatgtttatttatgtgccatatcaacaattcttggaaaatgttataaacaccctctgtctaccttttcccttccacctgtgcccaaggctctgcgtgtatgtgtgtgtgcatgtgtgtgttcacccaactgctctggtttcttagaatttcaatttgaggccgggtgtggtggctcacgcctgtaatcctagcactttgggaggccaaggcgggtggattgcctgagctcaggaattcaagaccagcctgggcaacacagtgaagtgaaaccccgtctccactaaaatacaaaaaattagccaggcgtggcagcatgtgcctgtaatctcagctactcgggaggctgaggcaggagaatcacttaaacctgggaggcggaggttgcagtgagccgagattgcgccattgcactccagcctgggcgacagagctagactccacctcaaaaaaaaaaaaaaaattcaattggatcactttctctgattattccaggcagaagacatcaatttctctaaatagcaaagtaaagcatttggtttgcactgtactgtgtttataaggtgtagcatttgtccgtctctacggctgatgtacacgtacatttcttcataagaccacgagttttcatgcaaagtgtcttgtatcttgcatattgcaggcccctggcctattgaattaacaaatgcatgaatataccacacatgcagaggccagaaattctccctctgaaacaaattctgagtgggcccagagaccagtcagtcttcatgtcaccaggtttgttcaatcccatccctgcgcacggcaggagccatccagcgaaacccagacagaggtgttggtgggagtggactcactttttcagacgcacttgctagtttggagcctgaggcattgaaggtgatggcagctagtgttccctcatgggcagcaatagtgcagactgttttctgttggtgaaaaggaaaaatggatacagatgctgcggaggagggaagatggatttcacctccctccccttcctcttttctcctttctccctcctttgtccagctccctgtctcttcctctgtcccccaggccatctgcatgtaagctgtgtgtcattttctggtgaatcaagatttggcttcaagggccactccatttccatcccttttcctgcccttgggaaggtggccacgaacggagcacctgatgcagtgtgatgccgtcgcaggcgcgccctgcacgcatctttaggcaacttcccacagcaatcttgtcccgctcagggatgcctcagagaccagagggcagggaatatgaaacacctgcacactgtctcaggctgtggcatgggacagggtgacacattcagggagacaactggccccctgctggcaagtggttttcattatgctgcagatgtctaacttggcctggccagctggcttatggtgaggttgactcacagcaagcccgaggggaaatagtatcaccttctcttgaacaactccccagtattgcttactcccaccgcctccagcccccgacggcagggcgtccttatctatctccttccatgaccacacagccaaggcaggtgggttggctcagccaggtcaccgtcaacttaccagggagtttccatcataaagcacaatctcccctgaagtcaggcttccaggataggccaggtaagaattggaatggttgatagagagagcacatagacctggcaaagaagaaacagaacatgagaagcctggggccaagggagagattgcacggctggagagggcatctgaaaacagtacagctacagtgccacctactggcaaggggaggaatggctttgcagacaactgctttccgctgatgattcttctgattaaggcttccaataaagcaacttcacaggggaagacctcctgatttaacactggctgcgtccttgctacagtgaaacaatgagacttgccgggcacagtggctcatgcctgtaattccagcactttgaggcgggcggatcacttgaggtcaggagttccagacaagcctggccaacatggtgaaaccccatctctactaaaaatacaaatagctgggcatggtggtgcgtgcctatagtcccagctacttgggaggctgaggcaggagaatcgcttgaacccaggaggcaaaggttgcagtgagtggagatcgtgccactgcactccagcctgggctacagagtgagaccccgtctcaaaaaaaaaaaaatatatatatatgtgtgtgtgtgtgtgtgtgtatatattgctcatttttacattttaccccaggactctgaaacagcatctacttttcttccaattccattatcctctagggttacaagagatttcctcaaaactgaaataaatcttcctatagtgaaaagtcagtacatattggtctttctgcagatgattatatactgttggccagtaacttcaagttggagaagaggagctgccaagaacctatttagaaactgagaaatttcaggccaggcaaggtggcccacacctgtgatcccagcactttggcaggccgaggcaggtgggtcacctgaggtcaggagttcgagatcgggctggccaacatagtgaaaccctgtctctattaaaaatacaaaaattagtcaggtgtggttgcatgtgcctgtagtcccagctactcgggaggctgaggcaggagaattgcttaaacctggaggtggaggctgcagtgagtgaagatagtgccactgcactccagcctgggtgagagtgaggttctgtcttaagaaaaaaaaaaaaagaaaccgagcaatttctgagccaaatgccctgccttgataagggaaatgggtacctcccgaggaggaagtttatttgaggtctgcgtctgcagtcaagatggtgtgcctagacattgagacaaactaaataaagaggacattttggatttaagatgcttcaataatattccggaagagtaaacagcccatcaaaccactgaaccaacataagctgtttttatttataaggggattcaagaagggagcatttaagtaaaggattttcaaaacaatggtttagatgaatagaggtgcacatgatagcagtgaattccagcaattccatagaaaccaaagtgttaccagaaactttgagatcacgcaagagagacatctctcttaaaaaaaaaaaaaaaaaaaaaaaaagtgactggcgtctattacaagttagtatattaagtgggtttcttctaaaagtataagaaaaaactttaggtcaggctgaaacatacctcaactaatctgctgaggaaggagagcaaaggaaaaagaaagtaaacatttagagttggaacctaggtctcatttcctgctctggctttgctgagtccacagcagggctgtcctcttatcacttgccatgcatagctacgggaggaagtggctgagccccggaacctttaactgcacgttctggcagccctgccacccctttggcgatacaaggtcattcctggccccagccttagaagaggccactcgtccatttccagttttgctctggaaaccccaattcctcaccccttctgaattctttgctatccaaatgaaatttcaagaacagctaggcaggcagaagggattctagtcttgtgaaactggggagggaaggcagtcaggagatctggttgtcttgtgtgctgggttcccaaagaggcggctggcagaaaagatgtgaagactgtggaaatcttacaaggactagcgtaccaaactaaagagttaagaccttacaaatgcagtgtgtaactgctgaaggtttctcagcacatatgttttgctttgttttttgagatggagtcttactctgttgcccaagctgcagtgcagtggtgcgatcttggctcactgcaacctccgcctctttggttcaagcgattctcctgtctcagcctgccaagtagctgggattacaggcgtgtgccaccacgcccagctaatttttgtattttcagtagagacagggtttcaccatgttggccaggctgtctcgaactcgtgacctcaggtgatccatctgcctcggcctcccaaagtgctgggattacaggcgtgagccatcgtgcctggcctagcacatatgtttttaaaaaggctgtgttaaaaacacgatgagataccactgtacaaccactaggatgactatagtgaaaaagacagataaatgttggtgaggatatggagaaactgggatcttatgcaccgctggtgggaatgtaaaatggggcagtgctctggaacgtttagcagttcttcaaaagctaaacataaagttctcatatgacctagaaattccactcctacatatacacccaagagaaatttaacatatgtccacacaaaaacttgtatatgaatgttcatggcagcattattcataagtcaaaaagtggaaataacccaaatgttatcaactgataaatggataaagaaaatgtgatatatttttataatagaatattatccagcaagaaaaataaagtattgatacatgctacaacacagaagaaccttggaaacattaggctatgtgaaagaagtcagtcacaaaggaaccgatattgtatgagtctcctgatataaaatgtccagaatagagaaatccataatctaatagagacagaaagtagattaggggttgcctatggctgggggcatagggagtgatggcttagaggtacaaggtttggggcgatgaaaatgctctaaaattaattgtggtgatggttacacaattccgtgaatataccaaaagctattgaaccatgcattttaaacgggtgaattgtataggatgtgaattttatctcaaaaaagattttcaaattttattttaaggcatgtttcaggaatatttatctggttagagataggctgaggacatgagttcaagactgaggtctgctatgtactgtgaaactctggccgagttatttgctgctctttcaggcctgtttcctgtctgtgaaatgaaggctaccgtgatatagaggtctttccagatttaacacttcaagatgccaagccttcgtttcttacttcttccctctgaaaatactgggcgtgtctttgtggcagagagagctaagcagtcttggagcagaagccttggacgcatacctccagctgtgcttcagagtcttatgttaaaacataaatattcccagaagggaagaaacgtttaaactttctaagctaatattgaactttctgcaatacctattatagaactggttgacactagatgctaacaagaaagggacaaaggataagagtgagggcaggcatactctgacacataccacttatttgacagttttgcctccaggctcgcacctctaccaatccatctgaatttagacaaggaatcctgccttcctacccttacagacttaatgaaggtccccagaaaagcctactgtgacttccctatggcccaagtgtcagaaaaatccaacgagccacacgaatgtatcttcgtatcttgggaaccacccaaggcaagcaagaagagttttccttagcttggctattgccattctgccagtctcctctttctgttacaggtgttacacaaagcctttttaaggaaggatatgggctttaaaaatattattgtataatataaaagtgatggtgtagaacatttgcaaagcctagaaaatataaggagaaaaaaaatcacccacaattctaaaacccagaggcttttcactgttctgaacatctgagcatattttcttccagtcttttttctacctaggaatgaggttctgatggggcttttggatgtgttatagcttgacacatattttcataagtcactggcagctataattccactgtaattgtttggctgtaattcttctacagctggaaaagaagtgcctgctctcaactcaagaaccaatggcatcatcagtggaattcaaaggaagtcccatgattctaaatgattctcatcttggtatttaaagtattgcatgtcaaactttaggtaagttaacagtgatttataaaatgcagttccctctgagttgattaatgtctcaggttacgctttccgattttcaaaaatagaaagacatcttctttgtacagcaaatgccctatgctcctacaaaagggaagcatttataccacttttattagcattttcaaacaagaaagaggtcttgctggggaagaaaccatgaactgttcaatgatctgcattgctgtgtggtatggaacgctccctcaatatcccataaaaggtggtcagctctgtgaccacctcctccatactgggaggtctgcagttggcaggactttcatggagatttccacccttgactgctcagagcagactgctgtgctagcaggaaattaacttcgagcccctgtctggccaagctctttaaaggaaacagcctgcaatctctgacacaacaggaacgggcatgacacaaacagacagaaagaaggaaatttacagctgcgttagataccaagtgtgaggcaacaggcgaactctgtatagctaatttacttgtagtttatgaagtcaaaatgcattcaggatttgtgtgctgaagacaattagacgagtgattgtgtcttccttctgtacccagcaaggatttataaaatcaacagtcacagtttccatcttatttctttgttcagaaaataaactagaggatgagaacagataaggcgactcctggcctctggggaatgtataattggcagggcggagtcctctgaaggttcccgagtgaggacctggtcatgtcactgaagcgcagctctgacctgtgcaaggctgtcctatgggacagagagggctgcggagtgagtctgactgcccgcatggacagggcggacccacctttgcccacccaggccacaacctcaggtaacgctctccgtggcaactctgggggctaaaaatgatcatctccattttactgcagtagaaagggagctcaggagaagttgaggtgataattataaacgtgagcatttaaaacaccttgggctatatctccaaagaacatcagaggtctaaaaagacacagtttgctcctggtctttcagaagaaatactcaacctatccctggatcctttcataaggaggcattcttttatctgagacagaggaagtctctgctattgtttctcatttttcttgagataaaatcgattccctttacaaacaatatacactgtctctaacagggaacacaaatagccctgcacttttaaaccttattttctctctgtttaagctgcagaaagtaaggcaaccagtgagttttctgaactacagaaaaacaactatatttgctaaaaaataagagtaaatggtggctaagtatgctgactcatgcctataattccagcactttgggaggccaaggcgggcggatcacttgaggacaggagttcaagaccagcctggccaacatggtgaaatcctatctctactaaaaatacaaaaaattagctgggtgtggtggtaggcacctgtagtcccagctactcaggaggctgaggaatgagaatcacttgaatccgggaggcgaaggttgcagtgagctgagattgcaccacctcactccagcctgggcaacagagtgagactgtgtctcaaaaaaaaaaaaaaaaaaaggagaaacatctgtttgcaagggagggtgctcagtcctgaagcaaccctgtcctctgggggtcaagtgtgcaacaggtgtgaggagtaagtggcatttactgtccactcccctctcttcagagaaactgagagccacaggcagcttctagctttctgcatgcccgatgtccctccccaaatccctgaaggcccagctcaggccctgccagcctcaagctctatgcagattcaggggcctctcattcctgatcagaagagcacatgctcccttcaactgtgtccgcaccccagagttaaacatggttccacccctgccaaaggctgctggcgcacctgtctcagaccacctcagacagactgttgaagggaactcgtgacaactagattttgggctcctggtatgaggttgcctaatggtgcctactatggtgccaagcacaaagaatgtctgcaatagatacttgtccagatgatttcagcctctcatttctaagggaaaaacttaccacccacagcttcttcacgtaccgtcttccatttcagaaaatgtgcttcaaagtcattatctcacagaactccctaacagcctcaatggctttgttcttttatttatttatttatttttaatttattcattgttttttgagacagagtctcgatctgttgcccaggctggagtgcagtggtgcgatctcagctcactgaagcctccgcctcctgggttcaagtaattttcctgtctcaacctcccaagtagctgggattacaggcactcgccaccatgctcagctaatttttgtatttttttggtagagacagggtttcttcatgttggtcaggctggtcttgaactcctaacctcaggtgatccacccgcctcggcctcccaatgtgctgcgattataggtgtgagccaccgcacccggctagctttgttcttttaaaatatccttttgccatagctgaaatgtgaaagcactgaaatcaacagccaagggccatttatagaattggaatgaagagaaggcatcagaagtatttcatgcatggcagttcctgtgctggtcactttcacaaacattaccttgtttaattctcagccaaccctgggagatgggtattattcataagggaaccaaggttcaaaaagtctaggtgacttggatggcacccagatagatcttgaaattcagtgaaagccaaataactcagaaacagcaaatagaagcagttgttcaatgatactaaactgaaatataatagaagcagttgttcaatgataccaaactgaaatataatctgcaaatattaatctggagtcattaaatgtacaagttgttccagtgtgctgactcctcaccccaccacacaatgaaggaattctttcttgtttactcctagcttgatgaattcatataatgtcatctgctatttcaatataacaaatccaaaccattcctcttcttatacaccaggaatgtattaaatagtgttaaatcccgagaattcagtaaggtttaatatcctagcatatcgtcgaagtagagagatttctttgtcatgtaataaaacatattctttatggttcagattgtctttttgctggccatgcagacacgccaagttgaaacctgcttctaattatcacgcctactctgtactgaacgaaccacaaaaaacaattaggggtaaacacttttcaacagcagatgcttgaaatcttttacatgtctaccttacgtgccttgacacatttgctgatatgggtcccagacaaagggtgttgttattcttggactgcaatgaagggcacacagcccccctgcaggacacacagcctgacataatttgaatctgccgccattaagacaaagcttcgagataaacctcactaagactcaaaaagcaaacactgcttcacgttcgcaatttggaggaaaataaagcttgggaaagaagcaccaggacatgaaatttcagggacatttgttccatttttggagctcacctgttgggtttgcaggaatatccaggagggtcttcaacagcttcatgtctttaatgttgtgaatataaatggactcttctaggcaaaccagcagcctctgtaatcacacagacttatcagtctaccgaaccgttccttacaaagaccctgaccaaatccaaatcattcatctttcatatgagtcctaacttgattctaagcctaaagcagaattttgatgatgcattttgaagattgtgtttatggatgtacacacatacacatgtaatcatccacctgaacacaagcataaaatgcaagatcttaagaaattttattagaaattaagattgtttttacttctctccttccttcttccctccctccattcctccctccctctcttccttctccttctttccttagaacagggatcctgaacactttttttttttttttttttttttgagaaggagtctcactctgtcacccagactggagtgcagtggcgcaatctcagctcactgcaacctctgcctccagggttcaaacaattctcctgcatcagcctcctgagtagctgggattacatgcatgcaccaccacacctggctaattttgtatttttagtagagacggggtttcaccatgttgatcaggctggtctcgaactcccgacctcaggtgatctgcccgcctcggcctcccaaagtgctgggatgataggcctgagccaccgcgttcaacaggacttctgaacactttctgatcagaccccctgtgccatgtaagacaatttcatgtgccttctgtagtttccactgccatctaacaggctgcctttcagtgtttatagcacaggtctccctcctatataaaaatgggtttctttgctttctctccatcaccaaatcttaggttttacccctctctgaataattaccagctctaacttatttctactcagactctcctccaggcctgcttttgggccgctgtctgagccctggcaaagggaaaaggagaagggcttcggccccatttgaacaccccagtgccccacgtccccactgttccttcctgggctcctctctctggtgcttgctctccccactgctgccagacccttctcttcctctccacatgaaagcttgtcaggttcagagcctcttcccaatggctgtgctctcagctaagtgaaaacaggccacagggttgatgtatcgggtgtttaaaggaatataacgcatagcccagtacaagggcagacatcggtgctggtgaggaggtgtcaggaaggcatttctggttgggcagctcctcgcacatctgagcagctgccgaccacccctgcacatgcctgacttggctcccctcaggccagtgtttcttagacctggatgcccaaggagctgcccaaggagcaagccctgggctctccccggagattctggtttgggaagtttttagacgaataccaggtgattgcgatgcacactgaggctcaagaaccactggtctcagccagctccttttattccagggaacatcagctagaagggaaggtaccaaaaaataccacacaaaagaggcaggctctgctcctgggaaaagcctgccctgctattccccaaggaagactatccatggctcagaatgatgaaggtcatcagtgttaaccaagcagaaaaataaaatttaaacacatttctcaattttttttttttcagacagggtctcgttctgtcacccaggctgcagtgcagtggcaggattacagatcactgtagcctcaacctctggggctcagtccattttcccaccccagcctctcgggtggcagggactacaggtgtgcgccaccatgcctggctaattttttggtattttttgtagagacccgggtttcactatgttgtccaggttagtctacctcctgagctcaagagctcctcctgcctcggcctcccaaagtgctgggattacaagcatgagctactgtgcccagccctttctcagttttacctaaggctctgtcgtaggtctgagactggggactgagggttaaaaaaattctaacaggttctcaaaattgatgataaatatgagtgttcctctgtgaaatattctctgacttatccaatcactgtgccttttgccagcacatgccgtggttagaactacgtggttctatgcttccttctgttcagaggtttctgatatcctcttgtgtcccctcccagccccacacccaatccctgggatagcggggccttgacatatgcctctcctagaaacagcatctacatctagcccatctgatctgatctgcatttttttcccaagagctctgatggcaccatctgctctgcggctcactcagctgaatttcaggtcaccctcatgctggctgcagataagactaaacgcagagggaaacagagagaaaacactgggagggaacgaggatgcactcttagttcgtgtgagagcatgcttctggggtgggcacgatgctgctgattgcttttttaactatcagttttcagcccccgcagaaccatggtcttgccttcaactcagctccttgtctgttgctttgaatttcatctacttttctaggttttataagcaataactccttttatcaattacaaaatatttatagcatctgccctagaacaccacagatttggcctcagaggcttcgagccaatcagcctccatctggatagcaagggcccctgggaggagactgcaaaagaactgtaaaagtatgcaaatctaaatacatcatacagctgtcttgattccataaaatatatttcctcagttcaatacaagagaaataacattaactaaaaatgaaacatatgacaattcctaagtgttcttcttttttaaatttttaaatttttattttttatagagacagggtcttgctgtgtcacctaggctggaatgcagcagcgtgatcatagctcactgcagccttcaactcttgggcttaaacgatcctcctgcctcagcctcccaagtagctaggcctacgggcaagtgccaccatgcccagctaatttatttttatagtaaagacctagtaaagactaggtctcgttacattgcccaagctggactcaaactcctgggctcaagcgatcctcctgcctcggcctcctgaagtgctgggaccacacttggccctttccttcctatatacttagaaaaaagggatttggggccaggtgcggtggctcacacctgtaatccctgcactttgggaggccgaggtgggtggatcacgaggtcaggagatcgagaacatcctggctaacatggtgaaaccccatctctactaaaaatacaaaaacattagccgggcgtggtggcaggtgcttgtagtcccagctacttgggagggtgaggcaggagaattgcttgaacacgggaggtagaggttgtggtgagctgagactgcactccagcctgggcaacagagtgagactctatctcaaaaaaaaaaaaaaaaaaaaaagataaaagggattttggatccttataacaccttatccaaatctttaactttttcctgtttttcaaaaaagaaactgtgctgtctgaaggcctgaggaagtagcagactgagtgctacagaatagaacaggacacactccccttgggcctttatcatttccccagagtgggcagtcctcccggacaccacagaatccctacctggcaagagaggctgcagcagctgagttgcttaaaccaaaatttaagtcccaaacctgaaagttttaagaaaagcaaacccccaatacttcccagacctgtttcaaatcattcttgtcggagaagaaatgtaaaggaagggagaactcttagatattggttccaatgaaccgatgctcatcttggttccgacgttagatcttggttccgagaactgttagatcttggttcgtggctttgccatgaattgctgacagttcctggtgcatcagtgttctttagaaggtgggggaggagaacctcacagttaatgagtattatattaaggggaggctggcacctaaaggttaacagactcggacactcaaataggccttccttgtcccatttgctaatgaatataccagacagaaagagagaaatcatacaagcaaatacaatagacgctatttgagggttccggtctttacagatcatttgcctaaacaatcttaaaaagatcatcaggtgccaaaaacagacatttaaccttgtatacggattactactatatgcaaggataaaaagtttagcagcgaaacttaatctgctaccaacagatttcagtgaaaacacctgagtcaagaatttcatctaaaagccttcaatcagaaaactctcaaactgcctttccctcccttgccaagaatgcaggtttcttttctttcttactcctgctactccctacttaaaaggtcccacttctctttctccagctatttttcaccgcactgctttaggtggacttaagtggattttcatttgaaagagttgatcaattcaaagaaacaatcccttccttctcataaatttaaaaagcatttatttgtctcatttgttaaaaaaaattaattagtacttaagagtttagacaaagacagaagaaaacattgtcctcaatgaatgcagcaaccgctctgggaatacttaattgaatagataaatctgcatggtcacataaagaatctctttgtttatttacttatttaacagtcagtcaggaaacagatatttatgagcacgtatctaccaagcactgccttttctaccaggtcgtataatggtgaacacaccagcacagtgcctgccttcacagtaatttggccaagcgtggtggctcatgcctgtaattccagcactctgcgaggccaaggaggatccttgagcccaggagtttgagaccagactgggcaacatggggaaacactgtaatatgattcagatcagtgtccctccccaaatctcatgtcgaattgtaatcttcagtgttggaggaaggtggcagagttcttatgaatggtttagtaccatcccccaccatagagtgagtgagttctcacgagacctggttgtttaatagtgggtagtaccccccacccgtctcttggtcctgctcctgccacgtaagacgcctgctcccgctttgccttccgccatgaatcaaagctccctgagccctccccagaagcagatgctgccgtgcttcctgtacagcctgcagaaccttgacccagtgaaacctattttctttataaattacccaatctccggtagttctttagagtaatgtgagaatagacgaatacactctggcaatataaaaaaatacagaaaaattagctgggcgtggtggtgcccacctgtagtcccagctactcaggaggttgaggtgggaggattgtttgagcctgggagatggaggctgcagtgagccaagattgtgccactgcattccagcctgggcaatagggcaagaccctgtctcaaaaacagaaacaacaacccaaaatgaaaacccagcaattcaaaaggaaatctgctaacacccccaatacttactgaataagaatttatattttaaaagagaacatattgcctatttgagatcagaataatccttcaacaaagaaaatgctacaaaaaaaacaaaaagtcttcaagggttagctgggaaaaagaaaaatgagaacccaaggctgaatagcagaccttccaggagagctgaggacgtggtgggagaagggcagctttcctgacccagggagcccccacttcactctcaggcatctcctgctcagtggtattgccccaacatctgcaatgaatgacactatctagggcaaaaccagaagagtcgctcctctgatttaaggtgctcttgcggtggctcatgggactgtccaagccagagctctgacccatccctgcggtgcccaatctgtaccctagggagagggtgcagcctaccagtcagggaccaacgttctggaaacatgagccagaggtctagggaaaacaacgttacaaccagcacctggagtagactctgtttacaatacccccgggacacggggcctgagtgttaacattctcattagaattggaagcttgttttacagacattgatcttgaaagatgtccatctttttgtttggctcccgttagcagaagctttgaaaccctgagggatttccccacttacttgccggttcagccttatggacaagatgttgctggagtagctgtaattacagatctctgtgcctttcttgaagtgatacacgttcatctgccgtggttttgtgtgactgactaccaccaccaggctgctggagaagaggcgctccacgatgtagacgtccgggatttcatctgggaggaaaagcagccgggaggttacatggattgatcacttccaagaaggattccagcctccatgacactgggcccggcgcaggccaggttccaaaggttctccgggtcttgccggccaggcgccctctctgagcttgcattgacagtgatccaccatgccccccaccctgccaggtggctttttaccctctcccagggagcactttcagagtcctttccaaatatctaaagtaaagaaaacactagtggcctggcatggcggctcacgcctagtaatcccagcactttgggaggctgaggcaggagaatcacttgaggccaggagttcaagaccagcctggccaacatggcgaaaccccatctctactaaaaatattttaaaaattagccaggtatggtggtgcacacctgtaatctcagctactcgggaggctgaggcatgagaatcacctgaacccaggaggaagagattgcagtgagccgagatcacaacactgcactccagcctgggcgacaagcaagactccgtctcaagaaaagaaaaagaaaacactagtgactagactgcaagtcagagcaaaggcagacagctgcctctgatgctgtctgagtggcagaatctcccctccagaccctagggctccactgtttgctctgtcaaacatgtttggaatatttgaacaattttcatctaccctttccctgagagatttcaaaggcgtgacttctcagttgggaacttctgcttcagaattcttcttgtcctgctagaggggtgccaatatgggaggggacagtaacacagttaaatctgtactccccccaccccctatcttgctgtgctccctggatctctttcctgctgaaaaccatctggacatcagtattatgacgaggaaagtacttctgtactcaggaagaagttagttaatgaccctcctgagcacaaaggttacggctttggtatctttctgagcacattcttttcatatgtgtgcctttcttccacttggaaaaggcccacagggaacaatgtgggacagacatagagcaaaaaattcacaaaaatggtgtaataacaataacatcttacaaataaagtaggagcccaaaatattatttactgaaccactttttttccaggaaactgaaaggttgtatattgttcgctattatgatggcataaaccatcaccctgacaaaataaggaagtcacatttctagtgaattatttacagtgttcactagacatgcttcaacatcattgacatgggctatgtaaataggataccgttgccttcttcaaacaaatacttccaaaactgaatcaatgttatcagtatcttatggtgccaatataatggcaaaaataagtcacaggtggctgggtgaggtggctcacgcctgtaatctcaggactttgggaggccaaaatgggcagataactcaaagtcaggagttggagaccagcctggccaacgtggtgaaaccccgtctctactaaaaatacaaaaattagctgggtttggtggcatgtgcctgtaatctcatctacttgggaggctgaggcaggagaatcacttgaacccaggaggtggaggttgcagtgagccaagatcgtgccactgcactccagcctgggtgatagagcaagactccatctcaaaaaaagaaagaaagaaaatgtcacaagtgtcctttaggtttgacagttataaaaattaatgactgtgcatataagcatgtgaaaaagtctcaataatatgatttcacacaaataatttcttctataaaaagaaaatgttacttaaactgttgccagatctaagtgcttgtggtttaaagcaagtagtggcaacgatttatatttaaatctaaaaatcttgactccctaagtttgatggctaaggaagggaaaaataggcagcttggtagcaccgcagattaaagcctagaaggaggctctggttctcctgcagatccctgaggtctctctcacacacacttactgcttccgtggacttgatccagctgctccacagaactcagagaaaacagcttatacccggctttagttccagttgctagggatctgtggaggataatgacagcatgggaataacgacaggtattctaacaacagatctgtctgcaaatagatgccttttgccccctagcctcaggggtacagtaaacaagcatctgcaggagcttagatccttggtaacttcctaaatggtgacgcatgtcttgacaggcaggaagagcaaaagaaaagaagaaaaagtcaaaggcaacttaaaaaaaaaagtgaaatgatcaaggggcatgaaactgcatgagctctgtcatccaacaaaatgtcaaatctagcagacatgtttttcccactgggcagataacaggaaaaattgaatgtttaagaatattcataatagctgaaagctctacctccaacacaacgagggggccttcttgttgtctgagaggcactttaccagataaatcagtttttctttccttcataactttatttgtttgttgcttataagaagaaacatgctttgcttttcttttcctttttttttttttttttgagagggagtctcgctctgtcacccgggctggagtgcagtggtgccatcacagctcactccaacctccgcctcctgggttcaagcaattctcctgcctcagcctcccgagcagtgaggattacaggcatgcaccaccacgccaggctaatttttgtatttttagtagagacagggtttcaccatgttgactaggctggtcttgaactcctggcctcaagtaatccacctgcctcggcctcccaaagtgcttaggcatcagccaccatgcctggtctaagaaatacactttcaaagtaggcatagtaggtcattagtaggtaaaatttaatagatgcttcctttcatcagtttccagaaaaatgtcctgatacttcatactagtagctctcacacctggatgtatattaaactcagctgggaagtttaattggatttgaagttcaagtattctaatgagcagcccaagttggagaactctgctttctactatatcctacaaagcaatcatcacaaccaacaaacaaaatacaaactaaacatttatctaggacaatcaaagtgcctcttaaaaaaaatctggttctcttaatttttcatttttcaatgaggagataaagacaggacgtgaatccagattttcttggccttgtgttgaaagtaaacatcaaagtcaactttgttcagcagctgggaatcctcacccagctctttccagctgtgccctccgcacctaagtgatgaacagaatctgacccggagcacactcacagaagtgtgcttctctggaaggcaaggtgaaattcactctttacagggaagcatatactaaaataagcaacttactattacaagcctggatggccaaggctcttgtttcactagcctaaaaaagagaaggtcacatgattttccctggaattttttttccctacccagacatttgttcttccctgggacacagggatagggcaactacagtaaacttttaatccacaaggtagctggtgacgtctcgcagccctccaacctgctaagtagctaaactggtgggttagacatttgcagctgtgcacttagaactggcatttagtacctagactgaggtattcatgatgacaaacagcaactggaaaagtaagcccagagcatcttaaaacttcaaaatgtattttgtagtgttattgtttttaaactttcttcacataaactttttcacataaatatagatgtgtttggctgcgaaatgaggtttgtaaagtttgcaagtaaggaaagaaatactgtaactagagtcttataacattaatgcaaagtgacagcaatttaaagtaattttcaaacataagccctgctcctggaccagaagaattctacatatgagaaaatcacagagtgatgttttatgtgatgttttacgtgattgatcaatggccacaaaagactctgaatcaaggaatttagacttagaccttatttcatccataaagtctttctgtagaaacaaaattctaatcaccactcatggaaacagagcttgggacaaatatttatcattaatcaaatttaaaatgtacccaaagtaggctgggcatagtgtgtcacatctgtaatcccagcattttgggaggctgaggtgggtggatcacttgaggtcaggagttcaagaccaagctgggcaatgtggcaaaaccccgtctctactaaaaatacaaaaaattagctgagtgtggtggtacacgtttgtaatcctagctacttgagaggctgagacaggagaatcgcttgaaccctgggaggcagaggctgcactgagccaagaccacaccactgcactccagcctgggtgacagagcaagactgtctcaaaaaaaaaaaaaaaaaaagtacccaaagtgtatagcacaagtaccaatcacgaagtatgagcgtaggggactggtaagggtttgctgttttcacctaccttctttggaaatactggatcccaaattcagcctacatttatagaaaaagacatggcaatacacctaaatgtattcagtaaggggcttgacttattttaaaatccaatgtcataccctctgtggctcaaagcaactgactgtgacaagaacttttatttataggcaaggcaaagctgcccagcagagcttccatccaagaaaataaaactaacagtagggagtaaggaaattaactttcaaagcaccctaccgttttgaaaataacattcttattcaatttctgtagaaagctgggactttgcgttatttaatggctagagtataaattaacacccttttttgtcaaatctaatgatgttacaaagcagaatttagaacatttactacttacaagcaaactaaccccctttcttaacttgtgttcaattgggaaggaaaacatcacccaggcatttcaacagccatgccctcttgcaaaatgtttcttacagaacatcaggattttatctataccagcatttttataaactgcaggtctcaactcatgagtggatcctaaaacgcaattcagtgagtcacaagcagcttagaaaaaaaggacacagaaaattgcacatgatattttgtgaatagtgtatgtgttatgggtattgggtgatgttgcaatacatatttcgtattgtggattgtggtcaagaaaaacttgaaagtcactcaaataaccaagctgtagagctactcgattacatgattacacatatgggtttttcaaacaaaggcatattgttcagcaccgggtgtttttaaacagaaacataaagggaatggaagccagggtggctaatggtacataatggccttaattacaccactgaaggatcaatattagcgtagctcagtcaccagcagccaaggcacagaaactggtacagcaggaagtgggaaactgggaatcggtcatccccgcctgatgctcagggtgcacattccaaaaagatgattccatatggtccccagggctcgcttccatgaaaatagggaaagaaacaggcgtttgcctgtaagtcacagaatcctgcagatgcctgaaacacacttcagcccagctccctctcaaagcccaaatgtgaacatcgaagtaaaacattaaaaatccactcaaaaacaacagggtggagctcctgtttcctggagagaaagcagtctgcgcccgggaaaagagtcttggactccgagaaggagatcctgcctggctgggtgggcgatgtgaaaacagccaaagaaatccaaaggtttcttccatccagagcgggcaggcacgatgccctgcgtcggggatgggacaggggctggcctggccgcagggataggctgcctctttgtccgaggccctgcccagatgccacgttgagatgctcaaggacaaatgggaaagtttttcctgtactctcatcttcctgggccccaactacagagtcctgggtcaacttgcaacttcctctcctttctcatctctttcttttggccactgtctctcttccccagacacccactttggtcactggctttcccaccgccctgctccccccatattccgtggcccccgcagccccaccactccctttgcgaactccctgctttcacccttggcccaaccttgtcgctctgggaggacactgggagtggggtggggtggggggtgcggcaaaccccactgaaggggtacggggataacaagatcccaatgcgtccgaagcagacaccggccctcccgccgaggccgcctcgaggcggaagccacaagctgctctcaggacgacacccctgggtcctgacactctgtcccccacctccctggcaggggccgagtcgcagcttacgtgcagtcctggttgaaagagaagcagctgagcgccgactcaaccccgcccgggggagcgtccgcggcctcggcctccatcgggggctcggcccgggaagccgcagctcggagccggcgacagccacctcagcagcccgcccgcgccggctccacgggccgggtcgccggtcctgccccgcccctaccccgccccgtccccaccccgcccctaccccgccccgtccccaccccgcccctaccccgccccgtccccgccgcgtccccggcttcgccccgccccttctcgcccctccagctggtcccgaggaccagagcacctgatagggcggggcccctgcctccggccaccattggccacgagcccaagccacggctggcgggcaccgccccccttggccaatccgtggcagctgtgggcggacccgcccggctggcgacccgcccctggcttcgtaacgcggctctccattggacaaaggcgcgtgacgcaaaggcagcaggcccacgtggcggtgttttcattgccggagccgcccagctgggagggagagggaagaaggaatgcggctggggccagatctgctggtttcagtccggcaactgcgtcggggccgccgcaagggtgacaggaggacgcgctagttcccaccccgcccagaccccttgccatgtgtaactctgcctattaaacttacagagtttagcagagagcgttagactccaaagccccacccttttgtcgagtcctcaagccgcattgagagaagctcctgaaatggggctgcctcagccagagagatagcaagttatcttatccattgccgagcggttgagaaccctcactacttgccaagcgcgccgtactatgtatgtcatcttgaattcttataaaacttgtgtggaaaatacgattgtgctcaatatacagaagaggcaactgaagctccaaagctaaacaatttgtctaaagtaacagtaaatggtagaatgtctgcatgtctgctttcaagacctgtgcactaaataactgctaaacagtaatttgcaaaaacaacgtagcacctagcatgcgagattctaggttttctaaccaggacagaaatgactgcagcatttgacggagctggaaggtggggggaagcacctttgatctgaaaagttacaaaaatggcacaaagtatctaaacaagacctatccgatccgcagctgaaaaaaatgaaagtgtgtgtagggcagtgtagtttatgaaaggggtaacgtcttgaagatatagcacaattcaaaactcacgtaattcgagataaaccttaacaaagaatctctttttaaaagctgagtactgtacatgttcccatgcggaattactgtcaatacggtttatgaagcaggagctctgccagctttggattgtataactgctgatggatttttaattcattttttcaaattttgagatgatattttagttattgttatatgacagtctctcaaatcagcataattcaaatttattaggttggtgcaaaagtaattgcggttttccccatttcccacttttaatacccagtttatgacaaagctacttttatgtatgtgtatatatatatatatttaaccttggacctacaatagatgaacaaagggcactatttcacctaaacctttctggttggatttccggtttgtgttttctgagatgcaaatgtaacagtttcttttctcaactttattatttttttctctccactgatgtaaaaaatagttcagctcatagattcacagatgttattgctctttggctgattgtgaggtgttgtataaactatcagaagtgaatggaactgctgtttagatactttgtgccatttttgtaacctttcagatcaaaggtgcttccccccaccttccagctctgtcaaatgctgcagtcatttctgtcctggttagaaaacctagaatctggcatgctaggtgctacgttgtttggagaattacatgaagtgtaccataaagtttttaaagtgtaagctgttattatcagtttgttattaagagtttggactttatgggatagacctgggagctggtgttagtttttgagcaggagtgtttcatgataaaaaagcagtgtctttgtcagataaacttggccagggtgtgcagaacaaattagaagtgggaaaagatctagaagtctttaggggactaatgtgaaattctggaagtaaagggacaggagagactaggctaaagtgatgaaaacaaggccagaaaattagaccaaatcatagagttgttttcaggcattgctgtccagtagataaaatgagccccaaatgtgaactccacattgtaaatttcagttttctagaagatacatttaaaaaggtagaaataggcaaattaattggaataatatcatttatttaatccaatgtgtcaaaaatatcatttcaatataaagataatcaatataaagttactaatcagttaattcaggttttaattttttttttttttgagacagagtcttgctctgtcaccaggctcactgcaacctctccatcccgggttcaagcgattctcctgcctcagcctcccaagcagctgggacttcaggcccccgccaccatgcccagctaatttttgtatttttaatacagacgggatttcaccatgttggtcaggctggtctcacactcctgacctcatgatccacctgcctcagcctcccaaagtgctgggattacaggcgtgagccaccacgcctggcctcagattttaatttttttttagaactaaatattgaatatccggtgtgtatttttcacttacaccatatctcagttcacatgagccacattttaagtgttcatgtagctggtggctactttattctcagtagagtcttgagggactaaatgacaggcatggcaactgatggggaagggggaggggcagggaagaagagggaagagtcaaagctgatttcatggttgggaaggggaagcccattgggttgcttttagaaactagatcttcagtcaggtattcaggaagttgtatttcatttcagacactttaaatcagcagcagaactgcatgcttactggaatcaaggtttggatctagagctatggccacgggagaaaaatggtcaccttcccagcctcagcctttcctgtgaatggtcccccttatatgtttctttccaggctaatggtccattatggcaccagccatgtggaaataacatctcagggctgcctcatctgatttcatttttcccaagacaatatgtaagtctgtatttttatataaatctgtgcctattttattaaaaacctgtatttgtaggtaaatttaaaaaatgatgaaaactaattcttattttcaaaaagtacctcataagctaaactaaatacatcagctagctggatgtggtttgtggagggctggtttgtgatttctgttagaggtgtaagcagccactttgaagagctccaccctcaaaaaatttcccagaagtccattcatataaaaagccaagggcaaggttataaataacttaagaggtgctgaatccatttaatgtcaggctggtttttcttttttaacattctagttctgggttctgtgggagaggacactcttgatttgaatgttgggcttatgggcaacctaagtcttacaagttcttgcaacagcaatttcactactaaataacatcagcaaaagataatggggtaggtggggcaggggacaatgctttgttccagtgggaataagattttggcctttctctttctttcaactgaaattcctaaatgtctatcttttccctgaaaaacaaaacaaacaaacaaacaaaaaactccattatttctaggaaaacttactcgtaagtaactagtaagttacttaccagtcagcaaaatctgggaaaataaagctgggctctgggaattaaaaacatgtttggtaatacaaaattgcaggccacagttcatctaatggagagacttcttatttgtataacaatcaggttgtaattttaaaatgctgattagggcatgcacagggcattcacaggggaaggtggaaatgagacatcctgtctgatgcaacactcctgtcaccccatatggtcattcatggcacccaaccatctacaattaaagtaactactaggtgaacaaacaccactcctgtcctattcttctttttataaagtccattctatttttataaaatcaagttacaggaaataatctcctttctcttttctgctatggggcaacactcagaacatgaactgagaacgagttgaactctaatggaccagtgtatggtagccctttgagaaagggtaaaggaggaagggccctgggacaatggagccaagagggagagggagggaagggcgatgtgtcagtacgtggaggaagctcaaggagtcagccctatggtgccagggtagaagaggaggggttgggctgtggggtgatttctgggaaaggagatgatcgaactgattggcaagcaggaagccccagccagaagtctggccgagcagcaggtgcaactgggttttctgtttctaattatagacagtgtgtgtgagatagcatggctgcagtgaatgaagaggccctatcatgtgcccttgtcccccaaatggaaccattatttctggatttattgattaaaaggggagagacagggagcaaaaactaacaacacttctaatattccttgacttatatattccttcccaagagtcaggaaaaatgttatttcatgaaagagtgaattgatgtcttaatcttcattctctcccctcacctgtcttatttttgcctccagaatagccttcctaaaacaccaaggtgaattacaggttctcaataaatgcttgctgattggctgatgatcacgaagacagttgctttctacaagtgcttttgctaatgtccttggagctgagagtctgttacccatgccagtgcagagaggttcaatcaaggtgtttttgttcaccgaggcatcttcgcactggtcaagaacacagagacgggttcagcaggtcagccaatcaccctgccttaaattttagaatataattataggcgatacttgaaaatagaagaccaagctttatagaaagcttggtttggagcgtcatagatcttctcatgtgacgctaaccacatctatctggtctaggaatgtttatccccatcaggcagctgcatatgccaaagtggagactgtcgagtaagttgccaaaggccctaggacagtttttgatgcaggtgtagtttgtattctgtcccttccactgggtgcccaggttgcctgtcacgctgtctcttggactgctttggctcaaggctggaaatagaattggcatcttaacctgtgcttcatcctatgaagggacagaggagcaaggggtgaagagatagaggcagaattgtgccaagagggccacgggccaagtacaagggggagagtgtggagtcctgcagctcttcaaagggcaccagcactttgcctacatttaccaagggtacatctagaaatattcaaaaacgtcctttgctcccaagcagagagttagcctgtgctcctggctgggcatggcttgttggaacgtgctgtacgactttaggtttctttctagtctagcggtggtgcagggagtggtaatcattctctagaatcagtcacccctgggaagaaggtggattcaaaggctttgggcttagggtgagaggggcgtggctaagaatcccgagattcttggtgaacagtgccatctagtggtctgtatgatttagttctaggatggttggggggacacctcaggaaaaactggcttgagtgataagatatgggtagccagtcctaaagccccaaaagaaagtctctgaggctcccttgtgtatttttccaaaacctctttactgtctataaatggaaaacacagaagcctccctcaccacttcctctgaaggaggagaagtttggaaggagtttgtatattcattcattcatccattcattcatttgaccaatttttatcatgtgcctgttgtgtgccggtcatggctccaggttctagggatatgacgctgtccaaaataaataaaaacccctgcccacctgggcagagagaccattaacaagaaaaatgagatgtatagtatcttagatggtgataagtgctaagaaatgtatagcagtgaaagtgtgtttgggagtgtggggtgtagggaggagaaattttgcatagggtgggcagggaaggccccactgaaaatttccatttgaacaagacctcaggaagaaaagggagcaggttatgcagtcatatgggaaaaagctcaaagagcagcgaggaggcagggccgctggagtggggagaagagtggggagaactacaggcaaagaggtcagagtgacctgagaaatcactggaagttctgacttacactggaattcgacacagacagctgtgttgaaaagaaattgaaggtgtcttgggagattcacaattcactttagcacgttcaagtctccagaaagcccagcattatgtttatttaacattgtttcccaagtactttccaagcttatttaaagatagattccctttcttccaggaacacccactacttcatgtgggaacctgagaaaatggaaatcagctcagatgagcagactggaatgttcccaacagtcataaacaaggccagcacaaggccaggtgaaaactgtgtttaacccaaggccacactgtagctgcaaaattactgacattggcatatctaatcctttcttatcaaagcctctcccagacccactcgatttctccacttgctgaacaaaaatttctgagatatccgatgatgaaaccacctgcttcacaacacatccattcctgacctgattcctgtttcttctacctttcccttcctagcataacttaacacaaacctggcaaaaagccctttcccacagcctcttactgagatgcctcatggttcacttgatgtgcacaccctcttgctgcaggaagttaataaaactgacattgccgaggcggatggatcgtgaggtcaggagttcgagaccagcctggccaacacggtgaaaccccgtctctactaaaaatacaaaaattagctgggtgtggtggcacgtgcctgtagtcccagttacttgggaggctgaggcaggagaatcgcttgaacccgggaggtggaggttgcagtgagccgagatcgtgccgccgcacactgtactcctgcctgggcgacaaagcgagactctgtctcaaaaaaaaaaacaaaaaaaacaaaaaaaacacctaacattgaaaaggtttattcctcttatactttacctgtaggtgttatcagagcccagcgtttcatagaacgaggtgtaagaacagctggacaaaatgatcacttcctattatgaaattctgagtctaaagacattgcatccccccaaaactgtcttgtataccaatcaaaaacagcattttaagaatgaaaagggtgaggaagtgtgggttttttttttttttagacggagtcttgctctgttgcccaggctggagtgcagtggcgtgatctccgctcactgcaagctccacctcccaggttcacaccattctcctgcctcagcttcctgagtagctgggactacaggcgcccgccaccacgcccggctaatttttttttttttgtattttcagtagatacggggtttcactgtgttagccaggatggtctccatcacctgacctcgtgatctgcccgcctcggccttccaaagtactgggattacaggcgtgagccaccgcgcccggccccggccgggttatttttataagttactccttgtctatctggtcccttctgctgctaacatttttggctgaacatttgtactatgggatctcttggcttgatgagggtttaatacgcttcccttctgctgggagcctccttggactttcttgggcaatgcacagatgtctggagacagaccagattgtttctgggcaaaacaaagcacattgtctcagctttctattattattattattttttagatggagtctcactctgttgcccaggctggagagcagtggtgtgacctcagctcactgcaacctccgcctccggggttcaagcaattctcttgcctcaacctctggagtagttgggattacagacgtgcggtgcgcgaccacgcccagcaattttttttttttttttttttttttgtagagacggggtttcaccatgttggccaggctggtctcgaactcctgacctcaggtgatccacccgcctgggcctctcaaagtgctgggattacaggcatgagccatcgcgcccggcctgtctcagctttcttgagctgtgatgagtgtataggcaatggtgattcacaaaagcagacttgcatcttagaaagctccctacagcagcagtagaggatgtcggagaggggcgagtgatgggggcagagaccaggtgagaggctggtatgtcaattcaagtcagacactggaacttaggtgcttgctgtgggtggaggtagaatgtataggactcagtggcctattacatgagggaactgggagaggcaggtcagcatggagattggttgtcagtgtaacttgggtttcccctgaccttactgacttctgcgtgcaaatgggcctgtcgtgcaaatgggcctgtgttatcacttacccaaatttcaccggcttcttcctctaccttttatagaacatacagctccctccaaagcctttcctattaattactgggagtccccggaaatgcctcgcacgtgcggggacctgcccttttaggctttgcccatagggatttttgtttctgctgatgaaggcccttgtgattgatgcctaattgctgccacctgctggagtccactgtaacaacactgaagtgtttcttcccaccagtacacaccctttctgcttgtattgaaatgttatttatgttttctctctcttttttttttttttttttttgagacagagtctcactctgtcacccaggctggagtgcagtggtgcgatctcggctccctgcaatttctgcctcccaggttcaagcgattctagtgcctcggcctcccgagtagctgggactacagacacctgccaccacacctggctcatttctatatttttagtagagacagggttttgccatgttgaccaggcttctctctatctcctggcctcaagtgatccaccccccttggcctcccaaagtgctgagattacaatcgtgagtcaccgtgcccaaccatgttttctcctatcttatgttaatgtggagaattatattgagtaattttttattgaagtgaaatttacatacagttaaccatttttaagtgaacaacgcggtgacatctagtgcgttcacaaggttgtgcatccacctccgttatctggttccaaaacatttccatcactccgaaagaaaaccctgtaccccttaaacagctactacccatccctcctccccaagcccttggcaatgaccagtcagctttctgtttctatggatttatctattctggatatctcatataaatggaatcacacaatacgtggccctttgtgtctggctttcacttagcagaatgttttcaaggttcatccacgttgtagcatgtgtcggtatttcatttctttttatggctgaatagtattcctttgaatacgcatatcacaattttatacatttatcagctgagggacatttgggttgttcccatcttttggctattgtgaatatcatgaacatgtgcatacatgtacttatttggtacgtgttttcaattctcttgagaacactctgaactcctaggagtggaattgctgggtcacctggtaattctatgtttaactttttgaggaactgcaaaactgtttttcatagcagctgaaccattttacattcctatagcagcatacagggactccagtttctccatatccttgccaacacttgttattttctgtttttttgtttttgttttccgaattactatagccatccttgtgggtgtcatgaacactaaagttttatgagatgcctgcaaactgcaaacccttgggacatctaaccagtgctcgatgccccagcattctcactgagtcaaagccctactgtactctcaagatccctgtgctcattctgggtcacactcttgacacctggacaataagtttcaacacagagctctctctttatgaagctcaaatgggagttcaagaactcgatatctgaagcagatcccaggctttccttcctggcctgttctttccaatcttatctttcattctcctagctaaaatctcttgatataccaccagctctttaggtacactgggatatgattgcttccaaacttagctgcttagcttcggccggggatctctattatgcaggggttgttgttgttgttgtttgtttgtttttgtttgttcatttgttttggagacacgatcttgctctgtcacccaggctggagtgcagtggtgccatcatggctcactgcagcattgacttcccaggctcaactgaccctcccacctcagcctccacaagtagctgggaccacaggcacatactaccatgcccaactaatttatagatatacattttttttagagagatgatgttttgccatgtcacccaggctgtgatggaggtccttgttaggatggagagtggggccaatcatgcagatgatacagaaaaataaacactgaggaccagaaactttggtccctttggctgtaaggaaaaccctgtgtgacatcaaagagggcatgtctaggaggtatttgatatctgcatctggggctaagggtagatatgtgagattgggagagagatctaggagtcattgggggaagatgtagtagctgaagctgtgagaggaggcaggctgtaatggaaaatgtgtcagttggtaaagaactggaacgaaatgtcctggtttgacgttttgagtattcctttaattttaggaacactatcagaaaagaggctagcttgtgagctgagtcggctgcagcagctctaaaccacacattgctgatgagtgagaacctctgttataaatggaaatgtgaactggcaaatgctcattggctaaagctgaatgcaccagtttattttggtacctattatgtccatgatctcctattttccttattgattgcaaatacgcacgaggaataaaaagctggcttgctttccaaaaacatgactgaatgttttcactgctgaatatctaaagagggtacagattggacctttcattatttctctgaggttagaaatgtcctttggtgggtttctaatttttcatgaaaggtcagttccagagactatttacatgctgttaggaaaaacatcaagcagacaagacatatctcaaaatatttaaagtggcccattcctaggctctcagctcttctctctccacttcctctccagggatctgttccacagatgggggcttaagtcagcctctatctataggtgacccttgtctgaccttatactctggaatgctccatatgcctctgactttcatcccagggaacatcaacacccacttccgctggcattcctgatgggatctctttctcctgagcagttgaaagagtcctgcttcagtgactcccagggaaaattgagagagtcatttttttaaaaaaagagatttatcccacaccaaaacaggaatcactcattttgcaccattttaggcactgtctattttcaaggtaggctgcttttttttttctctcctgttcttccaatccatgaacatagtatagattgttaagtccttttgaagtgtaaaatttcccacaaccacatagctcaatttcttctacccccaggagcttttttttcttttaatcacattagcctgtgtatttctcccaaaacagttatcaaaactgaaattatcttgttgatttcttggtttacatgtttactatctgcctcctccatctaaaacaaagttccatgaggatggggtctcctgtcttctcctagcacctagagcaatgcccccatgtataggtgctcatgaaatgtttgttggctgactgacttacagaatcagttgcttaaatatcatacaaaactttccatcatgaatgtcctttttttttttccctctcttgagtaaggatgttgtcctgatttaactagcattattgacaaatgccaattaactgtattagtggctctcaagcttttggatgctctttacactcttaaaaattattaaggaccccaaagagcttttgtttgtatggattatatctatcattacttagtgaaatagaaattaaaactgagaatttaaaatatttattaatgcattaaagtaataataaacccattatatgttaacattaatattattttttatacccccaaacatacaaaacacagggagaacagaggcatcgttttttgtttttgcatatctctttcatgtctggtataatagaagacagctgaattcttatatctgcttctgtattcaacgtatcatatcacaacatcatgtagcctttgaaaaacccctctgtgcacttgtgagagaatgtgagtaaaaaaggcgaataacatcttagattttttttttttttttgagacagagtctcactctgtcactcaggctggagtgcagttgcgtgacctcggctcactgcaacctccatctcccaggttcaagtgattctcctgcttcagcctcctaatagctgggattacaggagcgtgccaccgcacctgactaatttttgtatttttagtagaggcagggtttcaccacattggtcaggctggtctgaaactcctgactgcgtgatccacccgccttggcctcccaaagtgctgggattacaagcatgagccaccgtgcccggcccatcttagattattttgtaaatagttttgacttcatagatgccccaagagagtcttgggtaaacccagggattgctgaagcacattgagaaccaaagattgatattagtggagaggaatatttttctttgtctttgaactacattatctttaaacactacttttctcttcgatatcctttgcttagcttaatattaaaatacatttgcattcctcaaatctgccaaaggtggccaagatacatagtgaggaaggggtgatggaaaaacaaaccaaaggttaataattcgttgcttttatacagacacatccacatacaaacaaaaaaacaataaaaacatgtgcctttgtgaagcatgcactgtgtgctctatattttccaaagattatctctattattatatcaacatttccaggcaggaattatcagcttcatttcatagacaaagaaatggaggctcagaaaaccaaaataatgtatgaaagattgccaagctaataagtaatagagaggtgactgccacccccaaatctcttttcttccaaaagcatggcctttttgaccatcaaattctagattaccacaaaatgggagggaaaaactcagaaacaatgaagagttcactgtacacattagccttattgttttgtataaatgaataaaaaaactaactcctttttttcttctagtgatgtgtaaatttaaaaattcaatgcattttttcccccagatttgaaaagtaatacacccacagcagaaaactgaaagacaactaaatgtccatcagtaggggacagggtggttgcattaattgcgacacacttgtggatgcaatactatgcagtcattaaaaagaacaaagcagctctattggtactgaaatagaactatctctaagatgggaaaaaataaggtggctcaagttctacagtatgctgtcatttgtatttaaaatgtatatatgaatatgcactggtaactggttgcttttgtgaattcagtagagggacaagcaggaggcagcttatttttctgtaaccataatctcctcctcccccagacatagaccttgatgtgtggtatggacagaaaccctaacttttcagagagcagaaccatccagccatgtgtaacatcaaaacatcactctcacagccaattcaaaatggctaagcccctctattcttttcccacctcctcctttccgttccgtctctctctctgcctgagttggggccatgagaggggattactgggagaggggggaggtcttcgccagggatgtccctgtagtactttcttgcctaatgcttttctactaggggagctctccaaatgtctgcaaatgcctgactgtctcagaggccccccacttgtggggttattcagaggactcccgtgagaccttctgaatggcctagtttcttttcttttttttttagacagagtcttgctttgttgcccaggctggagtgcagtggcgcgatctcggctcactgcaaactctgcctcccaggttcaagccattctcctgcctcagcctcccgagtagctgggattacaggcacccgccaccacgcctggctaatgtttttgtatttttagtagagacgggggttttaccatgttggccagactggtcttgaactcctggcctcaagcaatccgcccgcctgggcctcccaatgtgctggtatgacaggcctgagccaccgcgcccagcctgcactgcctagtttctaataggagtgaggaggtgtggttcagctgtcttcttgtgctcagctccttccccagtgccccacccacacaacccctttcttctgtggcccaggcaggtggcaagtaaggccattcaggatggctccagccttgctaactcccccagcctctatgactctcgaagctctcagaccctcaccttgccatgggtggagaagtcctccccacactaccatttcctcacccctccatgttctgggggacacaggtggaactcccaggaactttcctgctccgggcgtgtgagtcttcactgcactaccaagtttccaatcagggccagtgacttaacttgcagaccccagtgcaaaatggaaacgtagggtttcctgtccaaaaaacaggagaaactgctgttaaagacactaaaacataaagcttttctttaaaaatattttatttctaaataaaatgtaatagggaaaagagtgatgcgtgagcatcacacttaacttacaagttgcaaaaaagttaacattttcgtgtcatcattttatgtaatggctgggtgcagtagctcatgcctgtaatcccagcactttgggaggccgaggtgggcagatcccttgaggccaggagtttgagaccagcctggccaacatagtgaaatcctgtctgtactaaaaatacaaaaattagctgggcgtggtggcatgccactgtaattccagttacccagaggctgaggcacgagaatcacttcaacccgggaggcggaggttgcagtgagccaagatcatgccactgtacaacagcctgggtgacagagtgatactctgtctcaaaaaaaaaagtaataaataataaattgttaatgtggtatttgattgatcattagatttttctgctcacttttctgcaaattcattcactaggtcatcgacatactttcagcaacttcatttttaattgatataattgaaagtgatatcagcctctcttggcaaatgctggatcacaaataatttttaataatgagaaaaattattctgtagatgcaacttttggctcttgctacagcctccacaagttacaggaggtgacagaggaaatattagaatgtcattgtacacacttacatttaaactaaaattaagtctgggcacaatggctcttcacacctgtaatcccaacactatgggaggttgagtgggaggatcagttgagcccaggagttggagaccagcctgtgcaacatagtgagacctcaacgctccagaaattaaataaataaataaatacacttaaattcagactcacatagaactgattagtgtgaaaagataaaactactgatctagctacagatctatctgaaaacagttgatttggtaaatcaattgacctattttattatttatttatttatttatttatttgagacagagtctcactctgtcgcccaggctggagtgcagtggcacgatctcagctcactgcaacctctgcctcccgggttcaagcaattctcctgcttcagcctcccaagtagctcggactacaggcgtgcgccaccatgcctggctattttttgtacttttactagagacggggtttaaccatattggccaggctggtctcgaattcctgactttgtgatccgcccacctcggcctcccaaagtgctgggattacaggcgtgaaccaccgcatctggccaacctatctattttatatggattgttgatttctggaaagatggagagaaactggaaacggtgatttccaagtctcttctcattccctaaaaccttggaaactgggagaatgggatgggagagaacttattctttattggtataatttgccattgtttggctttttaaacatgtgcatgtattcgttttttgatttaaaaacttgttaacaagaaaaggaactcttgaagaaaaaaatgcatgttaacataagatcttcatactcagttgatcattgatactgttttcattcttgctaatctttctaaaaaccaccaaatatatttctatattcatgtgtattatacatagctatatatagtttaggtatcttcaattcagctgaaaaatgttaagcctaaacatttccaaatttagagcatttagtcacatcaactctgcttttccctggggctaagtttttggaaaggtagggagtcagctgtcatttctgctgtttttaaaaaggtgaagtgtgcttcctaacaaataaaaaggatgctgacagaaggttactttctgcgttggactccccaggcgtgtacaggaggtgtttgaggcttgagtgacttgtacagcagtgccccgggggcccgcttgatctccggttgtctgatgtcacacatagtgagaagtctggcaacaggaaggcagcgcggccttgggctgatcccgtgacgagtggtcagcagtgcaccgtgtcaggcggctctctacaaggatttctcaatcagcttatcaaaaataaataaatagggcgggagcagtggctcacacctgtaatcccaacactttgggaggccgaggcgggcggataacgaggtcaggagatcgagaccatcctggtaaacacggtgaaactccgtgcctactaaaaatacaaaaaattagctgggcgtggtggcgggcgcctgtagtcccagctactcatgaaaatcgcttgaacccaggagtggaggttgcagtgagccgagatcgcgccactgcactccagcctggcaacacagcaagatctatctcaaaaaaataaataaagataaataaatcacaatcaaaatgcccaagttttcctatttgctaacttaagtaaattttaaaaaaaatgtaatgtctttttaagttctaaaatctaagttggatttatttttgtaatgaaagaatagctcaacatctgaaaatcaatgaatacatttaatgcacttttagcatataaatcgataaagagggaaaatataaccctctcaacagatctcttagtggattgatatgtttcaaatccattcctgataaaaattctcagccagctgggaataaaagggaacttccttaacctaataaaaaaaatctaccaaaaacttctagcgaatattatacttgttgtggaaacatggaaagaatttccttggcatcaggcaggacacctgtgcccttgtttctacattgtagttaaatgggtgaattaaatcttcatatgtcaatacaaccccttgtgtaaagcataatactgaacaaagaaagcaagcaacagcaggatgagtataacatgaaacaattcctctctaagtcctgctgtatagcttcatcctagccattttattttgtttttattcattattattttttgagacagagtcttgttctgttgcccaggttggagtgcagtggcacaatttcatctcactgcaacctccaccttctgggttcaagcgattctcgtgcctcagcctcctgagtagctgggactacaggcgtgtgccaccacgcctggctaatttttgtatttttagtagagacggggttttgccacgttggccaggctggtctcaaactcctgacctttaggcaatctgccccacgcggggcagtgttgggattacagttgtgagccaccgcgcccagcccatcctagccattttgatacacagacttttcgttgtatctcaggtctaaacattttctgattttcattatagccacttctttgatacatatatttttatgcatatatatgtagaatattttaaaatttctaaaatattaagttttttgttattgttgttctctttaaagttgatttcaaattttgcagagaatatggcaatgtgatgttgattttttgggggggttattatgttttgttgatgccttctgtgtagtttaatatgttttgatgcctatggcctggtcaattttggcaattgccctatagtgtttacaaataatgttaatgcactaattgttgagtgcctagctctgtctactataatataatatttataatctactataatatttataatctactataatctactaggtcaagcttttacattatattgttcaaagcttttaccaccttgcttatgtttgggttgtgtgattgaaccaatactaggagatggtatgttaaaaactctcactatggctagaagttgtcatattctatttgcctttaccaggtatttgaaggcagaaggatctcaggttatctagcctgtcatgttgcaggaagtggaggtctccattttccccctttctttattaaaagagatatttttagaaatagataatatatgcacattgttcaaaatttacaagtactgaaaggcatgtagtgaaaagtgtttgaccccttctctgggctgtggccactcagctttcctcccggggcaaccactgttaccagcttcttaccagtccttctggaatttgtctgtccgtctctctcattttctctccttttcttcttctccttccttccctccatccttccctctctccctccctccatccctccctctctctctctctttctctctttctttctttcttagatggagtctcgctctgtcacctaggctggaggcaatctcggctcactgcaacctctgcctcctgggttcaagcgattctcctgcctcagcctcctgagtagctgggactacaggtgtgtgccaccatgcccagctaatttttgtatttttagtagggatggggtttcaccatgttggcagggtggtctcgatctcttgatcttgtgatccgctcacctcggcctcccaaagtgttgggattacaggcgtgagccaccgtgctcggccgagatttctacttttaatgtctgttttgttctcccaaattctgaattctgcagtatatcaaaataatatggcttttgctatttattcatttacaaatttttagacaaggactttcattgtcttggtacaatagagaagtcccaaacactctcttcttcagtcatatagtaattttataaatccacaacaatcatctttgcatatgacagtaatgatcataaacctttattcctttattcgtcatgcatcaaatctggttgacaatgagaggatatcagaacactcatccttccctccatcacttctaattcatttaattcttttcttttctctgctgtatctctgcttttacattttctgccattaattcatcattatcatgtaaattttattcacttcagagccaagactcactatgagactgcagttgcaccagtaaatattcagttttacaatcttaatgtcatagtctggagaatgtttcaagtgttgggttcaagtgaattctccagtttaatgctactccagatctttttccaaactcttatcagcccagcaagttgacagagttgacagatatcttttttccccgtgtgtacttatttccatattattcaacccatctggtcaaattcagattcagtgctttctggttttctacgcagatgattttcagttacttcccttcattttttctcctatgttcgatctaatgcttcaaatacaattttattcttgtttttttttttggtatatcttccatttttatttatgttatttgagatggagtttcacttttgtcgactaggctggagtgcagtggtgccatctcggctcactgcaacctccacctcccgggttcaagcgattctcccacctcagcctcccaagtagctggacttacaggaacacgccactacacccagctaatttctgtatttttaggagagacggggtttcaccatgttggccgagctggtcgcaaactcctgaactcaggtgatccgcctgcctcagcctcccaaagtgctgggattacagaggatggccgctgtgcctggcctggattatattttcaagtaagctttaacaaactgtacttgagacacaactttatgagtcctttaatgccccaaaatatctattatgttttcacatgttctttgatattttggcttggaatgtaatattttgtttaaaaacatttttcttggccgggtgtggtggctcatgcctgtattcccagcactttggggggccgaggggggtggatcatgaggtcaggagatcgagactatcctggccaacatggtgaaaccttgtctctactaaaatacaaaaaattagctgggcatggtggcgtgcgcctgtagtcccagctactcgagaggctcagacaggggaatcacttgaacctgagaggcggaggttgcagtgagctgagatcacaccactgcacttcagcctggcgacagagtgagacttcgtctcaaaaacaacaacaacaacaacaaaaaacaaaccaaaaaacccatttttctctcaacacatcgaaggcaatatcagattgcattctaacatccactgtgttgatgaaagtttgtattgcgatctgattattgttcttttgttatgaccatttagaaatatgtgtgtgtgtgtgtgtgtatctgaatgtgtctatattttatattcaatgttcagaactttcataatactaggcctaggtgtgttaaaccctatggttttagtatgtatatgttggacagttttgttttttttttttgagacagactctcgctctgtagcccaggctagagcacagtggcacgatctcggctcactgcaacctccgcctcccggattcaagcaattcttctgcctcagcctcccgagtagctgggattacaggcacacgccaccatgtctggctaatttttgtatttttagtagagacggggtttcaccatgttggtcaggctggtctcgaactcccaacctcaggccatccgcccaccttggcctcccaaagtgctgggattacaggcataagccaccgcgcccagcctaggcagtcttaatccatttctccatgtagatttactgtagggaaaaaacttagaatgctttaactatagttatccacattctctttttgtccagtattttagtttctacattgttcttatacttttcacattggtaattacagctattatttttatccagtaaaaacttgtttaggtttattcacagtcttaatattttcttttgtttttatttcttgtgttttattccttcatcttcgtactgtgaggtcagctgtggattgaattgctgttccattttaggtacagatgacataatctctttttcctcttgttgctttctacattttctttttgtatttggtgattttgcaattttgctttgctattttttgggtttggatttatgtattctgaatgggaactggcatgttttccgatgctcacatctatagttttcatcagttttggatgctatcagccatcatgtttcagatacttcttcctcatcatctctggggttttcattgagaatatgttatttttaaaaatgtacttcatcctctatgactcttaactttcctattttccagtttttatttttctgtgctgtattccatgtaattttatcagtcttttcttcaaatttacacattttctatttttctgcatttaacatcctgtttaactagtctactgagattttaatttcagtgattcctatattagtccattctcacactgttatgaagaaatacccaagactgggtaatttataaagcaaagaagtttaatttacccacagttccacatggctgggaaggcctcaggaaactttcaatcatggtagaaggggaagaaaacacgtccttcttcacatggcagcaggagagagaattgctgagcagagggggaaatgccccttataaaagcaccaggtcttgtgagaactcactcactatcatgagaacagcataagggtgaccacccccaggattcaattacctcccaccaggtccctcccacagcatgtggggaatatggaaactacaactcaagatgagatttgggtgaggacacagccaaagcttatcaatctcatgtttcatttctagaagttatttgatccttgaaaaaaatatagcagttcttttaaatcctagggttttccccttagattctttctttaatgtcttcgattatgtaaacatacttgattgaaagtatttttggactgttttataatttaaagttttgagcattaatattctattgcgaactcatcttctgggtagtgctatttatgagaatccctgtggcctgagttatgggaaggaccttccagggaggtttttgtttcttctgttaggtgccccagggatatcattatcccgggacatttttaaacattaatttatcagttcaggggttcccagacaaccctgctactatatatttcagatccaaacccactggaaatgcaggctagggggtttagtttctcaggggaaaactattttacccagactcagatgacacaagcttttttactttttttgaaacagtgtctcattctgttgcccagactggagtgcagtggtgcaatcatggctcactgcagcctcaacctcctgggctcaagtgatcctcctgcctcagcctcctgagtagctgggactacaggcatgtgccgtgaggcttggctgatttttgtaatttttttgtagagatggggattcattatgttccccaggctggtctcgaacttctggactcaagcaatctgtgtgccttggcctcccaaaatgctaggtgcaagccaccgtgcccagccaacacaaggatttttatcttcctgagctactggataattttctacgtttttacttggtagtagaccttgaaagtcctcagttttattcaggaatcttagattcaattctctacctcatgcaggtccacagcttcatctctatgtctacataggtaagaaaatataagcctgtagcttatcggtctaacagtcaggtgtctccctacccagttatagcaacagctcaccctcttgtgggtggttgtattttcagtgccatttttgtttgtgctttttattttgcctgtttgcctgtggcatgtttttggcccttgaggtttccctttcctctttgaaagcttagttacgcattaaaaccgcagtccccaacctttttggcaccagggactggttttgtggaagacaatttttccatcaaccaaggtaaagtgggatggttttgggatgattcaagctcattacatttattgggcactttatttctactattattacatgtaatatagaatgaaataattatacaacttaccataatgtaaaatcagtgggagccctaagcttgttttcctgcaactagacggtcccatctggggatgatgggagatagtgacagatcatcaggcattagattcttataagaagcacacagcctagatccctcacatgcacagttcacaatagggttcttgctgctataataatctaatgcccatgctgatctgagaggagcagagctcacagtactggtctgtagcccagggttgggtacccctgcattaaaacattatattaattgatctagaatttccaggtagccagacatttttctctttatcatagtcttccatctttctggaaccctgggatagttattcatacagccattcattcatttttttcgtgtgatattatttaggcacccattgtatgctggtcagtggggatatacacagttgaatagaccatgtcaaagccagtggaagcttgagttgacaaggaacacttctcggatggatggaacttaaaccgagatttgttgattacggaaaaggagacatatgtgtgtcgagtgcttgcttggtacgtgctaggcaatgcgctaggtgccagggcacaaagtggaagaaatgccctacctttaaggagtttataatccagtgggtggaaccagagacagactaggagatgggtcctgactgtgtggcaagtgctgtgtgttccagtgggggatgtaaaagccaccaggggagcaagaagacagggcaggtcagagacgatgtctccaaggagatgttggagttgaattttgaaagatgagtggcggtgagtaggatgaagcgacagggaaaaagacagacggatttgactgcatgtaatttaaaacttatgtcgtctttattggcaatttactatatgcctggcatagtggtgcatgtttgcacacattctcattttagcttcacaaaaaccttacgaagatgttattactctttgacagacaaggaaactgaggctcagttgtttgcccaatgacacacaactgttgggaggtaaaactggaattcaaatacagtttcatctcatttatatgctataatatagaaacaaggattattgggactttttttacggtgctgtaataaggaagcaatcactagcttttcaagaggaaaaaaataaatattttaaatggcaaagacatttaggattttaaaattcctctttgttttcaagttttgtacttccttcactctggggcaataaccctagacaccgggtgaaggttaaatagctcattaagcttagcgttatcaaaccaaatattgcccgtacaataaaggtaaaaagaatgggcagaaaaggaggctttgtgtgtctatccattggctcccttatctgtttttactaaggtcaatcggtggacaaaggaagggccagatgtcctcaaattgccttcagcatataaactatttgctctcagcaaatatatcaaccattcccacactggggtgacagaccacctggagcaagctatgagttttccaggcagaaagtatttctttatgattccagcttgatgtctgatcatatctggatgtggctaattgtttgtccttagttttgaggaagtccaatttatcagtttttttgaacaaatcatgctgtggtgtcaaacataggaaatcattggctaacttaaagtcagaaaagaatttcttatgttgtcttctacatattcgttagtttagctctacattgtgatccatgatctagtttgagtttttttttttgtctatgatgtgcatggacccaagttcatattggttcatacaaatcatcaaattgctccagcaccgggccaggcgcagtggctcacacctgtaatcccagtactttgggaggcagaggtgggtgaatcacctgaggtcaggtgttcaagaccaccctggccattatggtgaaaccccatctctactaaaaatacaaaaataagctgggcatggtggccagcccctgtaatcccagttactcaggaggctgaggcaggagaatcacttgaactcgggagacagagtttgcagtgagctgagatgacgccactgcactccagtctgggaaatagagcaagactccgtcttaaaacaaaacaaaacaaaaaaagcttcagcaccatttgttgaggaggtggtcctttttcactgcattgccttcacatccttgttaaaaatcaattgtcaggccaggtgcggtggctcatgcctgtaatcccagcactttgggaggccaaggcatgtggatcacctgaggtcaggagttcaagaccagcctgaccaacatggagaaaccctatctctactaaaaatacaaaattagttgggtgtggtggcgcatgcctgtaatcccagctacttgggaggctgaggcaggagaattgcttgaacctgggaggtggaggttgcggtgagctgaattcatgccattgcactccagcctgggtaacaagagcaaaactccgtctcaaaaaaaaaaaaagaaagaaaagaaaaaaaatcaattgtccatatatgtgtgtgtttgtttctagactctgttcagttcattgatctatttgttaatatttatgccaataccatgttgttttattactggggctttataatgacttttgaaattaggtaccattagccctccaactttgtttttgttattctaggtatttgtgcctttccttatgaattttggaatcagcttgtcaatgtctacaaaaaatccacaaacaactgcaggcatttttattgggattgccctgaaactatagagtaatatgggggagaactgacatcttggcaatactgactgttttggcacacaaacaaattaaatctatccatttatttaggtctttaaaaattcatctctgtaatgtgttgtggtgtccagtgtactgctcttgcacatcggtcagatttatctttaaatgttttgtatttttgatagtattagaaatgggagttttaaatttaaaatttttcattgttagtagatagaaattcaattaatttttttattttgactttgtatcctacaaccttgctaaactcacttatcgtggtatctttttttttttttgtattccatcgggttttctacaattttacttcttcctttctgatatggatgccttttatttcttgcttttgccttgttgaactgactagatcttccattataatgttaaataagagtgatgagagtggatgaccttgacttgatcctgatcttagatagaaagcattcagtctttcatcattgagtaaaatgttccaggtttttcacagatgtcctttaacaggttgaaaaagctccatttgggtcagttttggaatctcatcaaatgtagcaagaaaggctgacaaacaaagtagtgttttccatcccgacagagaaagcaagtgagggtgaagtctcagattctggagacaatccaaactaacaaaatgtccctaaatttgtcatgaaaataaaagtggggagtcaaaggatattgttcactttcatagttcaaggcaaagttaaatgtgctatgttcactttaaaatgaatgtgttttctgccacaatggcaaagaattaacaaattagcaatttagtttgtaagagatccacggaatatattaagacattgcagatgttatctgttttaccaaggactcaaagaacaacttgaacttctatgatttgctggattcaagggcatactgtgggctgcctttctgctaattagattattttacccaccaaactatcatggaaaaatgatcaaacaagcagtagtttacgcacatagaacaatttgcctagaattgaaggtaagctcaagacagatggagagtgggaaacaaagatcaacttcgcttccacaaatagctgagtgctgagtgacccctaaaatgagctaatattgggcaaggatattgtcctagacctcagagttcccctttatccttggattgtgttgtataatgcagcagtgggtttgcttggtaaaagagaaagagcaaagtaaaaaaggggaagacatctgttacttctattgagttaagccttctaaaaatatttcccttttagtgaccacttgttattttgaccctttgatcttttgctttggaaataggacctttgaaactcttctgctttcctccctgtgtttgtaaaatgatgataatgcccgcaccacagaagaagagactccgttttacatccaaagcttttggagataaggggttgaagtggctgaaggagaaaacactccaattattcttgcgaggcataaagaattacagtttttcatctaaaactttacttagaatcattccactgatcctaaagaaacatactttaagtttctttattttgagacagagtctcactctgttgcccaggctggagtgcagtggcgtgatctcagctcactgcagcctccaccccctgggttaaagcgattctcctgactcagtctcccaagtagcggggattacagatgcgtgccaccatgcctggctaatttttgtatttttagtagagatggggttctaccatgttgatcaggctggtctccaagtcctgacctcaagtgatctgcccgcctcagcctcctaaagtgctgagattacaggcgtgagccatcgtgcccagcctaagtttcagtgatcgagccccacaatccataacatgtttagtgattcagtgaactgttgattcatcaaagggaaagaagacattctcccagcaatcagccactttgcaatcagtttcacctcagtcacactggtgcctggactaagagaagagctcatgaggtttttttttttaatgtccgcataattaaggagtcttggacatatacatggctttgcaggaaactgttctatgaagtgattgggctgaagtctgtcacagcatcaggaggcacaagctccttatcttggggctgcctcttcctccttcttctcatccccctcttcctcttattctttctttctttctctttctttctttctttctttctttctttccttccttctttcttttccttccttccttccttccctctttctttctttctttctctccttccttccttccttccttccttccttccttccttctttctttctttctttctttctttctttctttctttctttctttctttctttctttctttcttctttccttccttccttccttcttctgctttccttcttttctctccttcctccttctccttctcctaattagctttctcttccctcttcctattataaaaataaattatgctcattgtagaaagtgaaaatatagtgtgactgtgtacttttgctctggaatgaaacttgagctgaaaatctggttccattgctaaccagctgcattaccttacagaagtcactcatctaatatgcctgtgcctcaggtacccaagtgttaatgggtatactaatgctagttacctcccaaagtcgatgttgtgcggatttttttttttctcagatgatgtcttgctctgtcacctcagctggagtgcagtggcatgatctcggctcactgcaacctccgcctcccaggttcaagcaattctcccaactcggcctccccagtagctgggattacaggtttctgccaccgcacccggctaatttttgtatttttagtagagatgggatttcaccatgttagccaggctggtctcgaactcctgacctcgtgatccgcccgcctcggcctcccaaagtgcagggattacaggcgtgagccactgcgcccggcctgttatgtgaatttaataagacattcatgtacacacattgcacagtgcctggcacatagggaaatctcaaagtatggttttgttaataaaaatcagaaaaatgtagataaccaacattataattcaactgctgggaaataaactttacctccaggtacatttttacattctagtgttttcaaatgaaggctaccaagttaattaatcaatacttacttagcctaacactatggtatatattgagaggcatatagttataacttaagccaacgtttcctgactttctcctgtgctaataatttttctgtattcattcattcattattgacttattggaaaagtggtttggggtcgggcgcggtggttcacctataatccctgcactttggggggccaaggcgggtggattgcttgaggtctggagttcaagaccagcctgaccgacatcgtgaaaccccatctttactaaaaacacaaaaattagccgggactggtggtgggcacctgtaatcccagctattcaggaggctgaggcaggagaatggcttgaagcaggaggcggaggttgcagtgagctgagatcacgccactgcactccagcctgggcgacagagtaagacctcatctcagacaaaaaaaaaaaagaaaaaagaaaaaggaaagaaaagtggttttgtggttattttgcattttctttgtgccagatagtgttctgggtatcagaggcataacagtgaacaacaataataatgaaaaaaaactcaaaaataaataaaaaaaatgcactcatgaagcttacgtttgtatgaaagagagagagagggaataaacagactagagaaattcatgtaatacgtcagatcgtgataaatatgaagcacaggggagtaggggggtggcatggggagagttgcaatttgaagatggccaggtggcttttgagcacagacccaaggaagtggggcagtgagccctgaggctgtttggggaggtctatgtttcaggtggagggaacagcctgccctgagatcgaggtgggcctggcttatttgagcaacagccaggatgtctgtggctggagaaaggtgggagcaggagagaagagctgaggtctgagtctgacagtggccagatctaaggagcttgcacgccattgcaaggcttctctgtcccatatatacaacctgattggcttctggcctgctttgacctatgaaatgagagaggaagtggcaagtgtccctctcaggaagaagctttaagagccagcatggggctgggtgcagtggctcatgcctgtcatcgcagcactttgggaggccgaggtgggaggatcacttgaggtcaggagttccagaccagcctgaccaacatggcaaaaccccatctctactaaaaatacaaaaaaaattatctggatgatgtggctcaagcttgtaatcccagctacttgggaggctgaggcaggagaattgcttgaactgggaggcagaggttgcagtgagctgagatcatgccactgcactccagccagggcaacagagtgagactccatctcaaaacaaaaaaaaaaaaaaaaaaaaagagccagcgtgggcttctccatcattcctttccctctgccacatggttctataaagaggtcaccttttagacctgagctctggagtgaagaaactatggaactggatgtcaggctccctggtggatatggtgtgagaaataagctttcagagggctctttctctatcctgtgtctgaattgggcttgtcttgaagctgtgtgtgtaaagcactttacacaatttttaaaatatttattttttattttttaaaaatttgaaaaaaaatgctcagatttttcctaaggcttgtctgaataagtttgggctatttctaaaccccagaggtggggctgaccagattgaagttatcggttaaagatttaggtagctttcctaggagaaataggatagaggttgggtaaatactaagtgagcacccatcttggaaagtatatatatatatatatatatatatatatatatatatatatatggaaagtatatatatatatatatatatatatggaaagtatatatatatatatatatatatggaaagtatatatatatatatggaaagtatatatatatatatatggaaagtatatatatatatatatatggaaagtatatatatatatggaaagtatatatatatatggaaagtatatatatatatatggaaagtatatatatatggaaagtatatatatatataaatggaaaaaatatatatatatggaaagtatatctatatatatagatagtatatatatatggaaagtgtatatatatatatgtatatatggaaagtatatatatacacacatacttctctttttgagaaagagtcacccatgctggagtgcagtggtgcaatctcagctcactgcaacctctgcctcccaggttcaagtgattctcatgcctcagcctcccaagtagctgggattacaggtgcgtgtcatcacacccggcaaattttttttttttctttttagtagagacggggtttcgccacgttggccagcccggtctcgaactcctgacctcaagtgatccacccaccttggcctcccaaaattctgggattataggcgtgaggcaccacgcctggctggagagtatatttttgctccaaagaggtgtggggtatttagatattaccagggactggtgggagaatggtaattggtcccttaagtaatataaaggggtgtgaatcttttcttttagagagagggaatgccatttgccctgattactcaacaggatttggaggagagttgtttagaaaaggagatgagcacagaataggcagcttttgaacccaaaagggaaatgtgtcattttacttgcctcccttggcttgtcttgttgatgacgatgtctggtttggaagccagccggcctgagcagacagcccttcagctccaggctaacaggggttgggattctgtcccagggtccctttggccctctgggcagtcccatttcactggctgagcttgtggcagagggggcaagcgtgcggggcctttccccatttatcccattggggccctttgttttccagtgtcctggctttttgtacctttggcagttacctggaggagtatccttagggcaacatggagagtgctggagagcttgtaaagcagccagttgttgaggttgcctcttgtcccgcatttctcctttttcttagccctgtcctcctattctgatctgggttataaaagacagaggaggctaatctgaggacctcctgcacagggagtgttgggttccatggctgagttttgtaatttccttccagttcatttttaggccaagcagtatcacaaaggaaaacttttttttttcttaaggtttggggtaataaaacttttcccagttttggggatgcatctgaggggcgtgtcctgtggtatggagatgcgattacccatctgtgaagagagaatagaggagaaaaaggaaaaaagaaagcactccctctactttcctattatcctgaatggggcatccctcatcatcctttgggttccagaatgaagcagtcttatcgtgtacccttggccccatctcgtcacattacccgcttgagaacagaggagatactggagtgaagagtgggtcccatgtttatccttgaggttctagagtgaactgtcttactgtatacctctaaccttgccttcatctctgttctaatggtaatctgttagcctgggatcagccttcatctctgtcctatgggtctcctgtgcctgtggccttggaccagcctgtatccttgtctccaagactctcactcagagcattttagcaaaaaaatgattatttctttctttctttttttttttttttgagacagagtctggctctgtcacccaggctggagtgcaatggcatgatctcagctcactgcaacgtctgccttctgggttcaagtgatttgcctgcctcagcttcccaagtagcttggattacaggcatgtgccaccatgcccagctaatttttgtatttttattagagatgggatttcaccaagttggccaggctggtcttgaactcctgagcttaggtgatctgcccgcttcaacctcccaaagtgctgggattacaggcgtgagccaccgcgcccagccaaaatgattatttcctttgtcagatgcctagttcccatgttcttcaagtagacaagaagcctgtttttcagctcactgctgcaaaggggctggacttccctccctgcaagatttgaatatgaccttgcaggacttgatgcttgttgagaagggcgtggaagtaattagagaagtggaggctccaggaggaagtgggaggaagtgggaggaagtgagaggaacacttgtggaaagccttcatatgcttgcaaaaagagcagacctcggattcaagagggcaatattcatttgccctcttgacataaagtagcaacctctggaggacttggggcttggagtaagaactcacaaatagcaaaagcagaatttcccctcctcccaagtggtgctaacgcacaaaaaaaaaaagaaaaaagtaggtgggatccttaaagggccagaagaaggccctatggaggtggacaaactgcttcaaaagccaccagaaaacttggtcctgtggcataacaggaacaaaaagcatatggtaagtcataaggagctggcagagccagagttccagttagtgtctgtcctggccatgggccagcagacaggggaagggttggaggtcatccaagctgttaggttaaaaccaagtataaatctcaggagatatccgcaaggaagcctgtgtcttttctgccatgcaaaagccgcaggcacatgaataacagggagcgtgtgtttaagaagtcatgtggcattcgaagtgaaagccaagtggctgacttgctcctgaggccgatggttcattcggcaggtgctcaaggccgcttttcaggagacacaggaaaacagaagaacaggcagtgcgggttcttgggaaagagccgatcttatttgaaaaagcagaggacaccccagatattgcacggtttgaggctttagctttaccaccctcatgagcctcttgtccaggagggtcattagtgccttagttctacttggtgcagaccccaaggttcttcccacccctgcgagccagccgtcagggtgagcagaaaatcagccatgggagcagagccactgtgactgagaggaattgttttgggcgttggttagtgagcaggagagcgaaagggagaagaaaactgtacaggggttgaatgcctgcagctgaagaaggtgtagagatctctaaccactagggaacatatgtgagctatgcagcgccaaagtgtgttagcgcttgggaacgtatccaagtcacacagcacccaagtatgctactggcggtgaatctgtatcagtatgagtctgcagcaacctcaattcttgcctcctcagaagaaagaatttgactgaggggcataaggcagaaggagagaccaaggcaagttttagagcaggagtgcaagtttattaaaaactttagactccatccaggtccctacaaaggacatgatctcattccttttttatggctgcataatattccatgatgtatatgtatcacattttctttatccagtctgtcattgatggacatttaggttgattccatgtctttgttactgtgcatagtgctgcaatgaacatatgtgtgcatgtatctttatgacagaatgatttatattcctttgggtatatacccagtgatgggattgctggtcaaatgctatttctgcctctaggtctttgaggaattgccacatagacatgtggtgggggggaataacacacattggggcctgtcagaggggtgggggttgtggggagggagagcatcaggaagaatagctaatggatgctgggcttgatacccaggcaatgggttgatctgttcagcaaaccaccatggcacacgtttacctatggaacaaacctacacatcctgcccatgtacccctgaacttaaaagttgaagggaaaagaaagctttagagcaggaacaaaaggaaggaaaatacacttggaagagggccaagcaggcaacttgaaaggcaagtgctgtgtaatattttttaaaagttaagttgtccatataaaaaaattaaatagggagaagctcatggaatagctgattccccccgcacgtgttcttacttttttgcagccaagcctcggagtggccactcccggcgctgtagcaatcgcttcccactttgtctccttgccaaactattctttgcactgatgccaaagatatttttcaacttgcaatttttttttttttttgagacagagtcttgctctgttacccaggctggagtgcagtggcgtgatctcggctcactgcaacctccgcctcctgggttcaagcgattctcctgcttcagcctcccaagaagctgggattacaggtgcgtgccaccatgcccaggtaatttttgtatttttagtagagatgcggtttcgccatgttggccaggctggtcttgaactcctgacctcatgatctgcctgccttggcctcccaaagtgctgggattacaggtgtgagccacggcacctggcccaacacgcaaatttaatagtatctatttcctacttaaagcccttgagtggaaaagcatgaagataaatggagaatgtggcaacatcgtccatcaaaaattttgaaagaaaattcttcacaacgttgtgaatagtttctaggtgggaggattatggatgattttaattttcttttttgtatttttctatattgaaaatgtttaaaaatatataatcaaaaatgccatttactggctccctgttctagttgcggcacattaaagacagccaaagagctttaacactctttccgttgacggactgggtttaattcccttccccttgaatctaggctggcctaagtaatttgtttgagtaagaaaatatgggccgagtgtggtggctcatgcctgtaatcccagcactttgggaggctgaggtgggtggatcatttcaggtcaggagttcgagaccagcctggccagcatagagaaacctcatctctactacaaaaatacaaaaattagccaggcatggtggtgggagcctgtaattcccgctacttgggaggctgaggcatgagaatcgcttgaacccaggagttagaggttgcaatgagcaagatggcactactgtactccagcctgggagatagagggagactttgtctcaaaaaataaataaaataaaataaaatagcaggagtgctgtgctgggacttcaagggtaagttataaaaagccatgcagcttttgcctgcctctcatggaacattctgtctggtagccctgaccactgtggaaaagttggataccctgagacttctgtaatgtaagtgcccggcaaacggtctcagctgggcctggtatatcaatcctccccaccaagcagaagccacttggtatccttcagaccagcccatcctccaggtgaatgccacccctgacctcagtcgacaccacatggaacagaagaatccccctagctgggcctgccaaatgtcctgctccacaaatgagatataattattgttttaagccttatgttaacttgttagatagccgtagataattggaattctattaaacaaagaaagtcttcttagcagggctaagatcctcctagatctggcctctgtctaccttcccttcctactgtactcttctttatatctcaggctcttttttttgagactgggtcttgctctgtttcccagactcgagtgtagaatattttagccttgaactcctgagcccaagaggtcctcccgcttcagcctcccgagtagctaagactacagatgtgtgccaccatgccctgctaatttttttaaaagtttcttttgtagaaatggggtctcactatattttccaggctggtttcaaactcctggcctcaagtgatcctcccaccttggcctcccaaagtgctggggttacaggtgaaagccatcatacctggccccaggcttcttctaggttcctgaaccaactatagtctttaccttggtgccattgtctataccagcctccttttcttatttattccatttgcctggactgacgttcccatccttactccattcctctgtcctcacctgtctatcacaccaccagctcctccatctccctggtaaattcttgttgagctttcaaaatttacctctgatggtgcttctggaaagacttacttcttcccatacagggttctatatcttctctgtgctaatgtttgtattgcacgtgcttctcttattatactcatttactcatcacatacattgtagcacatttgttctcatgtctatttcttctacttatctgtgtattagtttcttttgatgctataacaaattacagaaaacttagtgccttaaaaccatacaaatttattatctggaattctgaaccttagaaatcctaaatgggtctcaataggctgaaagcaagatgttggcagggctgcatccttttctgaaggctctgggggagaatctgttttcttgccttttatagcttctagaggcaggccacatttcttggctcctggtccctctctgcgtttcctttcctttcctttcctttcctctcctctctcctctcctctctcctctcctctcctctcctctcctcccctcccctcccctgcgctcccctcctctcccctcctctcctctcctctcctttctttctgatggagtctcactctgtcacccaggctggagtgcagtggcgctatctcggctcactgcaacctccgcctcccggggtcaagcaattctcctgcctcagactcctgggtagctggaattacaggcgtgtaccaccacgcctggctaatttttgtattttttgtacagatgtgttttcatcatgttggccaggctggtcttgaactcctgacctcaaatgatccacctcccttggcctcccaaagtgctgggattacaggcatgagccactgcgcccggccctctctgcattttcaaagccagcaatggccagatgagtcttcctaatgctgcatcactctgatactagctttctatcttcctcttccacatggaaggacccttgtgattacaccggccacgtccagataatccaggacaatctctgtattttaagatcatctgattagtaaccttaaattcatctacaatattaattcccatttgccatgtactgtaacacttcaacatgtttttgggcagtaggacgtggacgttcttgcaggggtcatcatttggctgactgcagtctgtgagctcctatggtaaaaaggctgtgaactatgtatcactctcctcgaatgtagaacagaagtctgctatgtagtatatgaggaagacatgatatttgttcaaatggagtttatattctaaaagaaggggtcaacaaatttggatctatcacctgtttttgtacagctcttaagcttagtttttactttttttttttttttttttttttttgagacagggtctcactttgtcacccaggctagagtgcagtggtgcaaacacagcttactgcacttgacctcctgggcccaagtgatcctcctgcctcagccccacaaatagctgggactataggcacacaccaccatgtctggcccatttttgtattttttgtggagacagggttttgccatgctgctcaggctggtctcgaactcctgagctcaagtgatctgcctgcccaggcctcccaaatttctgggattacaggcgtgagccactgtgcctggctgtatatttttcagtggctaaacaagctcgaatggagaatgatattttgtgacataaaaattagatgaaatttactttaaagtgtccataagtcaacttttattggaacacagccatgcccattcatttatttgttgtctatgctgctttcacactatagtggtgaaggtgagtggttgcaacaaagaccttatggccacaaagtctaaaataattacctatttgaccgttgacagaaaaaaaattgctagtccccgttctagagggaactttagaactttctgtgattgtgggaatatgctgtatctgggctgtccaatatggtagtcactagctacagctggcacttgaaatgaggctagtacccctaaggaaaagacttttaagctttatttgattataattaatttagatttgaagagctccctgtggctagtggctactgtactgacagccctaggagatgagatgataattatgaagatgctgataaaaatgtgataatttaccatgtgccaagtgccgtgctaagagaacaaggatgatgctcttatgattctcattttacagatgaaaaaaaactgaagcttagatggatcaagtatgttgcccaaggttacacagccagagaggggcaagctagaacccagggaggttgactcctgagctgttgctctaaccattaggctatgctgcctcacgaaagacaagacacatagacattgaattgtaacatgtgagagaatataatgagtgctatgaaagaagcaacaacaaggcagagaaataattaaggggaaaaacttctgaccagggagggaaaagacaccttcttcatgggtgccaaactacttaagatgggctctaaaatttgggcaggattttgattgacacttacatgcttgtaagctagatggatgcaaccacctaaacacaggtgtgatgggggaagtaaagggggggttaagggattggaaagcagtccactttgaaaattcatgccacacctttgctagcaaagggccacaagttttcttggcagctggtgcacttcctcttttctctccgtaacgaccatgtaaatgaccttgccttcgttttcactttgactggaagtttagcttcaaacttgagcttaacttgagcaagagcaaggaaccacacagcttgaatatttgagtttcttctcctttcctccccaaaagctcaatttctgctctgatgagtgttttctctggtcttaatatttgtttttatccatattttaacatcatttcattacgtatttatttcttgcaatgcccctgggtcgttttgtgaatacgtgtgggtataaatgacagaataggttctggttgtgggaggatgtgaacccagggagataaattggaaaagataagttggtgtcaggcactgggtacagtcagggtcaaggaagctggtgggtgctcctgcctttgagaaatagcctgagccagttaggtgccatccccatgcccttatctcctgcagccttggctgcaatcctggcagctccccactcagttcttggaaacctggcaattggccctagttccatcccacgccactgcccgcttgcttcctgtgctggctctgatgtctgttgacatcttcttcgagtgttaactcccaaacatcctcagtttcagtcttgttattggcatcaggggacacactggcatcctacaatctctctaaagtacaggccaatcagatccctctcctctttaaaggtcttctgtagctctcaggtggaagtccaagttcagtagctttgcttagggtcctcgttcacaccccagctctgcctcttcctcactacatgacttgggcaagttgtgtaacttctgtatgccggagtttccttatctgtaaaataggaacaacaatagtacgtacctcaaaaggtgctgtgagggtagggtgtgggaatctatgtgaaacctcacaacggttccaggcacagaagatctctccatgtgttattgtcactgtcatgagctcttcagactcacctcttgccaatgcccttcacacagtttctggcttcacatccagtggaattacttgtagtttcctaaatgtcctccagcctgaatttgctcatctttgggtgttctgcacatttcctctgctggaaagtgttccttctccctcttaacctattcttcctcattcttcttatatcagagagcagggatgtcatggaagtagaagggaggaaaagagagagagagagagagagagagagagagagagagaggagggatataagtaagcaagacaaactcagcaacaagggatgagaaaatattcagaaattgggtgctgatttgcattccagaatccaaatctaggagcaggcagggctgggacagcaagccaggcttccgaccagatgggctatccatcagggttgcttactacagctcactaatgaccattattaagaccattgcatgtaaaatgtttatttcaaggtggaaaatgcacgttgggtttctcagaataggtgttggaatttctactacaattttcttcagtatacagaggagaattgcttgtgttggtcctctagagttaagattgccaccgtgctatagagtaatgagttgtaagtggtggccactgatcacagctctttgctgtgggctgccaccccagccagtggtgtaggtgaatcagcgttggtcaaagtatggccagccagcccaggctcgccatgcagttacgacttttgactaactgaccacagtcactctttcatggccttcccttcttggatgacatgaagaccatacattaactaacaggtcacttcctaatcatccaaacaggaacctagagatttttatacccaggacaggatatgggacatatatcagccagagttcttatttgcaaacaaagaaacataacctaggtgatctaagtagaatcagaatttattgattatatactggatgactcacagacttctgagaaggtttgagaacaaggcttgagggctgtaccaattggaaacagttctcaaaatcacactgatatggtttggctgtgtccccacccaaatctcatcttgaattgtagctcccataattcccacgtgtgtgggagggaccaggtgggagataattgaatcatgggggcggttcccccatactattcttgaggtagtgaataagtctcacgagatctgatggttttataaggggaaacccctttcactttgttctcattttctctcttgtctgcctccatgtaagacatgccttttgccttccgccatgattgtgaggcctcccagccacatggaactgtgagtccattaaacttctcttcctttgtaaatcacccagtctcgagtattttttttttttttttgagatggagttattttgctcttgttgcccaggctggagtgcaatggcgcgattttggctcactgcaacgtacaccacctgggttcaagtgattctcctgcctcagcctcctgagtagctgggattacaggtgcccaccaccacgcccggctaattttttttctatttttagtagagatggggttttaccatgttggttaggctggtcttgaactcctgacctcagcttatccaccctccttggcctcccaaagtgctgagattacaggcatgagccacggcgcccggcctcaggtataactttatcagcagcatgaaaatggacaaatatacacaccgtgaaagtgctcaggtaaggacactattgaggatttgttccctgagatgtgagtagaaaagcagttaatggaaacaacgcagttttcacattctgtatattttccctgtgccttttgatacaagttccaaaggaacatttaacagcatgacagcttcctgtttatttattctctcatctcttactggttggtcaatgcacataagtccatgtggagagagctcggagcatactcctccttgacggtggatcagaagtgtcatcttggtttccagtatcctgcctgagctgtgaattgccctgactcttcatttctcactctgactctctgcagcatctgtctgcttctcagaacacttgcttcccttggcttctgtgacctccttcctctccaggtttgccacctgctttctaaatgttccttctgggctcccttcctccctttaacctctcactgttagccttactcatggttctatattcagctgcctttcttcttcccacttctctctcaatagcctgtcccaggaggtgctgcattcactcctatggcgttataatcaataagctgatgatttcaaaaccctcagcattctctctctctctttttgagacacggtcttgctatattgcccaggctggagtgcagtggtataatcatggctcactgcagccttgaactcctgggctcaagccatcctcccacctcagcttcctgtgtagctaggactacacatgtgcataaccatgcctggctaatttttaaatttttttgtagagagggacatctcactatcttgcctaggctggtctcaaactcctggcctcaagtgatcctccctcctcagcttcctaaagtgctgggattacaggcatgagccaccatgcccagaactcagctctcttaaacttccgaccagcaaggaagcaactagacggctctttgtggatgtccagcagcccttcaaactgaacacattccaaaatggaacccttgctgcttcttcctgtgttctctgattcagtgaatagcagcagaatcactgagttagaaatctaggtatcatctttgagtccttcctgtctcctccttatccttcacatcaatccctaggttctctcgctcttattttcttaatatctctcaaatctgcccagcttcattcacctgcatcaaaatcttttagttttagctatcatcatcccttacttggatcattgcaacagactcctgagaagtgttcaggctccagactccagagagcccttgcagtccctactcatgtccttgcttcattagaacccaaaagataaagtgtgcacttggtcacatctcttccctgcatgaggccattcagtaaatccccacagctataagacaatttaaacttctaaggcaggggttggtaagctatggctcatgggttgaatcacctgttttcatgcagcataaatgctaagaaattttttacattttaaaattattgaaaaaaaaagtcaaagaatgtgacacatgaaaattatatggaccttatccaaaatatacaaagaactcttaagctcaacaagagaacaaacaactcaattaaaaaatggctaaaatggggccaggcacagtggctcacgcctgtaatcccagcacttttggaggctgaggcaagtggatcacctgtggtcaggagttcaagaccagactgaccaacatggtgaaacccccgtctctactaaaaatacaaaaattagccaaggttggtggtgggcgtctgtaatcccagctatttaggaggctgaggcaggagaatcgcttgaacctgggaggtggaggttgcagtgagctgagattgcaccattgaactccagcctgggcaacaagagcgaaacttcatctcaggaaaaaaaaaaaaaaaaaaaaaaaagatattttgaatctggttctgagctaaagttgagtaaattcttagctaagaaaaaattggaaatccatcatctatattagcaacagattctcagagtaaattgttaacttctatgatttctgataatcgagctggacttgatcatacaagttagtctaataatgtattcaaccaaaatatagactttattggtctgattcagaagcattcatgctcacaagctttgggaaagtgaaaaataataaaatcattttggattaaaaaagaaatggccaaagacctaaacagacaccacctcagagaagactcacagatggcaaataagcacaaaaaaagatgcttaccagcatatgccattagggaactataaattaaaacaaggaggaaccactacacatttaacaggatgcctaaaatccaaagcactgacaaatgctggcaaggatgtagagcaacaggagctctcattcattgctggtgggaatgcaagatggtacagggtacacctactttagaatccagtttggcaatttttttttacaaagcaaaaggtacttttgccatgtgatccagaaattgaacttcttgctatttactcagagaagttgcacatggatgtttatagcagctttattcataattgccaacacttggaagcaaacgagatgtcctttagtaaatatggataaattgtggtacatctatacagtggaatattattcagtaataaaaagaaatgagctatccagtcacaaaaagacaaggaggaatcttaattgcatgttactaagtgaagcagtcagtctaaaaaggctacatagtgtatgcttccaactatgtggcattctgcaaaaagcaaacatatggagacagaatatacagaatatataaggagcttgaacaactatataggaaaaaatctaataatccaatttaaatatgggcaaaagatctgaatagacatttctcaaaagaagacatgcaaatggcaaacaggcatatgacaagatgttcaacatcactgatcatcagagaaacgcagatcaaaactacaatgaggtatcatagcaccccagttaaaatggcttttatccaaaagacaggccataacaaatgctggcaaggatgtgcagaaaagggaaactttgtactctgttggtgggaatgtcaattagtacaaccactaggaagaacagtttggaggttcctcagaaagctaataataaagctaccatattatccagcaatcccactgctaggtacataccccaaagaaaggaaatcagtatatcaaagagatatctgcactcccatatttactgtagcattattcacaatagccatgatttggaagcaacccaaatgtctgtcaatagatgagtggatacagaaatgtggtacaaggctgggcatggtgactcacacctgtaatcccagcactttgggaggccaaggcaggaagatcatttgaggtcaggagtttgagaccagcctgaccaacatgatgaaaccccatctctactaaaaaaaaaaaaaatttagccaggcatggtggtgcacacctgtaatctcagctacttgggaggctgaggcatgagaatcacttgaacccaggaggcggaggttgcagtgacctgagatcgtgccactgcactccagcctggcgacagagtgaggttctgtctcaaaaaaagacatgtggtacaaatacataatggagtactattcagccataaaaaagaatgagatgtatttgcaacaacatggaaacaactggagttcattttgttaagtgaagtaggccaagcacagaaaaacttcacatattctcacttatttgtgggagctaaaaattagaacaactggactgatggagatagagagcagaaggatggttaccagtggctgggaagtgtagcggtggagggtggaggggatgtaaggatggttaatgggtaaaaactagttagaaaggatgaataagacatagtatttgatagcacaatagtaaaaaataatttaattgtacatttaaaaataattaaaagagtataattgtaaaggataaatgctttgaggtgatggataccccagttaccctgatgtgattattacccattgtatgcctgtatcaaaatatcccatataccccataaatacatacaccttctatgtacccacacaaataaaaaatagagagaaaaacatagggagaaagtatagaaattcagtggttggacaggcgtggtggctcacatctgtaatcccagtaatttgggaggccaaggcaggccttcttgagcccagaagttcaagactagcctgggcaatgtggcaaaaccctgtttctaccccccaaaatacaaaaactagctgagcatggtggtgtgcacctgtagtcccagctacttgggaggctgaggtgggaggatggcttgagcccggaggttgcagtgagctaagatcatgccactgcactccagcttaggtggcagagccagactctgtctcaaaaaatatatatgtagataataaaataaaacgaaaatcagtggttatcagggccttaggggaaggagagagggataaacagtggaccacaggggatatttgtggcagtgaatctcttccacaggatgctgtaatggtagatgtaaatgtaattacacatttatcaaaactcatagaatatacaacagaaagagtgaactctaatgtaaactatggacttcagttaataataatgtatcaggccaggtgaggtggctcaggcttgtaatcctagcactttgggaggcccaagtggatggactgcttgagctcaggagtttgagaccagcctgggcaacatagtgagaccctgactctacaaaaaatacaaaaattagctgggcgtggtggtgtatgccggtagtctcagctactcaggaagctgggataggagactggcttgagcccaggagatgggaggttgcagtgagctgagattgagattgtgccactgcactccagcctgggtaacagagccagatcctgtttcacacacacagaagtatcaacattggctcttcaagtataacaaatgtaccacacgaatgcaagatgtcaatataagggaaaaccatgtatggagggttgatgaggtggtatctgggaactctctgtattttctgccaatttttttgtaaacctagaattgctaaaaccaaaagtctattaattaggataattacatcaatttcaaattcagtgttcataaatttttatcagaagacatccacgcccattcatttacatattgcctatggccacttttgtgatacaataaccaaactgagaagttgccacagtgcccagatggcttacaacatctaaagcatttactatctgcccctcccccctaccacaggccactgatcactcttccagcctcacaccatcttccatcttatccttaggccatcttgaaaaatattttccttagaaatccatgctctcttgcccattagttcctctacctgaaataccaggcaggactaactgggtaccattatatcccagacacctttttttggctggctttttctgatcactgatgcctgagttagatgccctttcaatgtacccccccaatcccacccccataatttggccattttattgaaagaactcatgttattgctggccccttcagactgtgaaattttttttttcttttttttgagacagagtgtcgctctatcacccaggctggagtgtagtggcccgatttcggctcactgcaacctccgcctccctggttcaagcaattcttctgcctcagccttctgagtagctgggactacaggcgtgcaccaccacacccggctaatttttgtatttttagtagagacggggtttcaccatattggccaggctggtctcaaactcctgacctcgtgatctgcccacctcagcctcccaaagtgctgagattacaggtgtgagccaccgcacctggcccagactgtgaacttttaagtttgaggtcatggcttatttatctctgcatgcctgttacctagtacctgctagtatccactagtgtggatgatcaggaatcattttataagggattctaaacttggagtccatacatggatgggcttcaggatctgtgaccaccttgaaatgggatgaaaaaggctgtgtgtgtatgtttgtttgggcttatttcctggggagaaagcccattgttttcatgagcttctcaaagggaaccatgaccagcctccagcaaagaaaaaaatgaagaattcctggaagagtataggtacatgatcagtacagtgccaacctggatacattaacaagatttgttgactttgtcagattgacaaaaacaaagaaagttactgatcctagtcaacgatcataccatccatgacacaaagatctgtgtgacaatagcaaagacatagaatcaacccaaatgcccatcaatgatagactggataaagaaaatgtggtacatatacactgtggaatgctatgcagccataaaaaggaatgagatcgtgtcctttgcagggatgtggatggagctggaagctattatcttcagcaaactaacacaggaacagaaaaccaaacaccttatgttctcacttacaagtgggagctgaacaatgagaacacatggacacagggagcagaacaacacacactggggcctgttggggaggcagggagggggagaatcagctaatgcgtgtgggtcttaatacctaggtgatgagctgataggtgcagcaaaccaccatggcacacgtttatctatgtacaaacctgcacgttcttctgcacatgtatcccgaacttaaattaaattaaaaaacaaacaaacatacatacatctgaaaaacaggaaaccactatcttttcacattaaaaaaaaaagatctgtgtgggtgactgactcatccctattttttaaagcctcaaatccatgacaaaaggtcagccttgtttaaaaacagcttaggcctaggagattagtattcaaaggaagaacattttagaagagattcatacaaatatctggacttcactgaatacatgcttgtgataattaattttgtgtcaacttgggtaggccatgctacccagttattggtcaaacacaagtctagatgttgctgtgaatgtattttttttttgtacatgcgattatcatttaagtcaatagacattgagtaaagcagattactctctttaatgtttgtgggcctcactcagttgaaggccttaagagaaaagactgaggttccctgaggaagaaggagttctgccttggacttgagactgcagcatcaactcttccttgggtctaggctgctgacctgccctgcagattttggactgtatatacccaaagaaatacaaatcattgtatcataaagacacatgcatgcttatgttcattgtagcactattcacaatagcaaagacatggaatcaacctaaatgcccatcagtggtagtctggataaagaaaatgtggtacatatacaccatggaatactattcagtgataaaaagaatcaaatcatgtctttcgcagcaacatagatacagctggaggccattctcctacgcatattaacacaggaatagaaaactaccgcatgttctcacttataagtgggagctaaacattgattactcaaggacataaagatggcagcaatagatacctggaactactagaagggggagtcggggagcaaggatttaaaaactattgggtactatgctcactacctgggtgatgggatcacttgtacccaaatccttagcatcacacaatatacccaggtaacaaacctgcacctgtacccctgaatctaaaataaaagttgaatgaataagtaaatatgctatttttgatgaagatatgttttagattaagatatttttacttggaacgctttagtgttagatccaagtttgccacccttctggtttcttggttaatattttcaattaatgctcaagataaacacccctccttagtttaaatgagcatttgccagtgagaaaagtaggaagacattttggcattcgggtgtttgctggaattagttatgtctgaaaccacaactttgggtctcctaggaagtataagtactcagtaccattgtacaccataagtaggtggtgatggactttgaaattggaaatacgtggatctgtgtttagccaatggaaactttaggtgcaagaaccaccaagaaatggaccaccaaagtattccttcctttcacgttttagctttcttaattctatttctgcttatcactcatgtttattttgcttttatggtttttggtattgtttcacaagcattgtaacagcaattatgcaatttctttttcgttttttgagtgggaaggtcttgctgtgtggccagggctgcagtgcagtggtgcgatcatggctcactgcagccttgacctcctgggctaaagcaatcctcccagtacatgcgtgggtcaccacatctggctaatttttaaaatttttttgtagagacggcggtctcactgtgttgcccaggctggtcttgaactcctgggcccaaggaagcctccagcctgggcctcctagagtgatgggattacagatgttagccaccagttaaacaggaaaatttacttataatcccactactctagaaacatatttttaaactgagtttctcaaggacacagtccaaaggaaaggctaacagacctttgaatcaagggcagaaggcctctggagaagggaaaccatacagaaactacagtggaacaaatgtcatttctgaaacataatttacgaataccaacaagttggtattctcacagtggcacagtggcactgaaagaacatttgcaccatttggaaagcactgaggctatttagtttttcagaacagctgtctcactgaactttccccgggctcaactgtctactgcccatttccctttatgtctcctaaagccccagcatatgaggatttggcacctagaacaaggttgagtgtgactgacacaggaaatggcccgtggctggactggcgcctgcatgcagctgaatggggacacacagccaggactcagcaaggaagcagctgtcactcaaagtgctcagctcaatgtcagcagcttgcttgtttccttattcttagtgtcttaactgcacttggaaggtaacactaatggtgggacatagtgtcactctgacttaaccttgtagtttgggtagctctgcaggaagagggagaaatgggaagtaaattaacattcatttaatatatcccccactgtactgaacaccatatatatatatgtagacagagagagagagagagagagagagagagagagagagatctatctattctgcaatggagagtgattaagatcactgcctgggtttaagccatgttagctgtgtggccatgggcaagtcacttaacttctccatgtctcatgtttttttctgtaacaataacaatattacctatgttaagagttactatgaggattaaattaattatgtgtaaagcccttagatcagtgcttggaacacagtaagtgctatacgtgtgtttgctgttatacccttagtagttaacttcaacaaagtcctgttcatccttttatgaccgaggaaacggacacccatggagattaagtcaattaccggacatggcagagcctgaaaccaaactcagatttacctgactgcaatattttcttcccataacatgaccgggcctgctcaatgctatcaaattccctctgctgcttgccagcgtagggttcagtttatcaacccttctttgtactgtcaagagtgaaatcctatctgactgaggctcttttatccccatttctgatcaaccctggagaagggccaatggtcaacatttggggagtcagtgaaaggagaaacttcccttttccattcccccctgtaagcctgattgcccttttgatatcgcctatgtatccctatcagaaggcagtgaataacataactaaataaatcatctgatggacagtacccttagagcctggtggatttgggggagcagtcggcctccgagggcagcgctgcccaataggaatataatgggagccatctgtgtaactttaaactttttaatagctacactaagaattaaaaaacaaaagtgaaattaactttaatattttacctaatatatcaaaaatattatcatttcaatctggaatcaatataaacactattgagctacttttttgtattgtgttgagttcatgatttactttaaacatacagcccttgaagtatatacaatgttactacaacagctcctggacacttgcatatgtgtgtattttgcttttttgtattgtgttgaatccattatgaattttaagcacacggccctagaaatatatacaatgctactaaagcagcccctagccagacacttggacatgtttccttgatgggccttctttattgagttacagacttgatgtgtctaaaattgtaccgtctcccttttcttcctccttagacagatactctgatggaaaaaaaaaatggctgaaagagtaaagtcgcttttcctccgaattttccccattagtgcagcttgtctggacagctgcgatttcttgttgggtcacagggcatttttgacaatctgcacgctctgcacttctccctctgtgaggtcaggagtgatgggggggcacttcaggttctagaaggactcaggcctcctcttggaccctgacaaagtcctttcccgtgcctggtttccacagggacggtgttgcctgcacagacgacagcacccccggcgggggagagcggccccagcggagactcggcagggctcaggtttcctggaccggatgactgacctgagcccggggcccgggcggcgctggccgggcacaggatgcgcggcccggagagcgcatcccggccatccgcccgcgctcggccccgcagcgcagctgctgcagatccgcgggggccgccacctcctccgggggctggcagcgacaggactctccccgccccggcccggggccctcccttgcaggggctgcggggaggagtcgcccacctgtcatctgagacgccccacgtgggtcggccagggagggggtggaaaggagggagaaaaggcagaggcgtcaagggaggccggagggagagtggggtggacagaggagcggagggacgagagggaagcgcacgatagctgcgcggagagagagcgaagagcaggcggaggaacaaaggcgacccaagacacccagagagggacaggtaaggaggggcaggtgagcaggaaggaggagagaaccgggctagggagactgcggaaaggagaagtggcgggcgtgaggaaactgctgtggataagggacgagtaagatggaaagaatggcggaagacgaacgaccgcagagtgagggtccttccaagagcgaccaggggggaggaactggggctgttgcgcccttaaggttgctaaggcgacggttctggccagagcgaggcgcattgacgtcagtagccgaacgctgattggctgcggccaggccgtttccggtggagctgtcgcctagccgctatcgcagagtggagcggggctgggagcaaagcgctgagggagctcggtacgccgccgcctcgcacccgcagcctcgcgcccgccgccgcccgtccccaggtgagtggggtcggccgggggctcaggcgaggtgagcttcgtcgcttcgcagccggtttgcgggagctggaccgatccaagatggcgtcacggggagcgacctgcagggggacggccgcaccccctgcccctccccggcccggcgggcgcctccccgcaggcctcacgcccccggctccgagtctgcatcctcaaggccgtctgggcgttggctttggtgcggggctccccagccgccccgctcgcgctcgctgcccccaccccacggctcctggggccctgggccctccgcggccctccccggccgccttcgcccccgcgcgccgcggcctcttcgctcaccctcccccatttcctgaaggacaacggctctattttactggggtccgccatcgtctcgtccgccggtcctggctcttcttgtaagccggtagttttcctctccacttttgacgactcgtcattgctagcagtagcctttcctcttcatagcggagtgatctttcccccaacacgacggtcttagtcgggctcctgaatttcctcttgtcccctttcacctctctccctttcccaattttgcccccctgaggcctcctcgccaccactgtggccttccgactggcgtagcttgaagtctcggcttcccttcattttgtggtcatgaccgtggcctacgtgaagtgaagggcattttcctgcccttcttctagaaaatacacggtacctattaacctcttcagctcagagcctgtggtgacgaccgtcctactccttgagagattcccaagagatccgtctttttagcagagcgaggaaagcaaacacttactcaagatgaccctaggggagccgtaacttggctggtctaagggggtgcggtctgaatcaggaacagtttctcaaagtgtttttatttatttcccagaatgtaatcctttcgaaacaattttgtcacaactgaattttcaaaagaatgaatctgagtgttttgttttacatagagacaatgcagcgaaagttttaaagcagttaaataattgtgtgtggggagggaaggctaggttgttgggctttacaaataagtacacatagagaatccgggtaactcgattaaaaatattaagactgtgaagtctggttattcagggatttacatggtgactgcattaattttggtacatttctgttcgtatactgtcctattaccggtggctatctttttggttttcgtaatacattagttgtttcaaacaaaaacacagtttcactccttaggcccagttctctcatctctaccagccaaagacctgatcttagaatgattgatcatttgaatgttcttaaaatatgacaatgctttgaagcatgaaagatctgatttatgattgttcttggtggcctttaagtattatttgaaatgcagacaattctactgaagtggatcttcagttcatatgattgcctgacctggagaagtggcttgtataaatctatcctaaagtaaatgcgcgtttttgtttttgttttgcctgtttaaagtagcagcatgattatttttccatggcttctaatttatgtgcttgtcttggagccacgaactttctaatggtctgttaattagtctacttgttgttgacctttatggtgaaagttgtcaaaacaaaatgagtaacagtgtagcactttagaatagctctttactctgttaattctttctataagttcttttaaatttacagtttcatctcaatagtttacaatgcattataattggaaaagtctgattagtattgaattcagttgctgagtggaggggaccacactcttgtcttctactcttaagtgcttagtaattaggagttggaaggaaaacagtatatgaccctgttgttaaattagtaaacttttaattctagggtaaggttagctgctcatcattatctctgtttgctttactttacataaaggtaccataattcgaatcctctaaaatccattaaatgcaatttatccattaaatgtaatccattaaatgcaatttatctattgaatcttcatgcaagtttgaaacttaagtgttttaacattctcctgtcaagatgaagaaaatattttgacaattttctgtccaaatgttttacagtttatgtggtaagaattctcccctcccccaactaaggattttccttcttttaccactagtgtattatcatttaggggtggaatctggcaaacgagtctggaataaaggttgcttttaaaactcatctaattttcttgtgtgtttttaaaaattttgattatgctagtagttggctaatcagatcctcactccagtggtttgctctgtgacgttaggatactcccatgggatagaagttacgtatagggaatgtcagatattcttcattgtgctgacttgctttcgcttacagttgacttttgtgccctggtaattctgtatcctgtttaccgtttacctacttcccacgtcatcatgatttcttttgagggagaactgaatgaaattcccttaagggcctgacttcagcacccgtctctgcagaggttagtggctcatacttcctcccaggagctgaggttatcgactctcactgttgcctacagagcacagatcctgaactaaatgaaacatttacttggaataatgctaattctgtacatattttattccctagtccccacttccctgtttaaaaacaaaatctacttagaaaaaaatccctgtgaatcagttgtctaatgaatttagcaagttaaatgccagattgacattttgctttatagtttatacaagcatgtgtgtgtttttttctcgcagagaaccatggagtctggcagtaccgccgccagtgaggaggcacgcagccttcgagaatgtgagctctacgtccagaagcataacattcaagcgctgctcaaagattctattgtgcagttgtgcactgctcgacctgagagacccatggcattcctcagggaatactttgagaggttggagaaggtaaaaataaatgtggggagatgatgaggtgattgtgacagttgttacatttaataactggaatgttactaatttgtattttttggaagaaaaggaatctgactaaataaaaagtctaaaacaatttcaaataagaaatacagttaaggcatttgtagtaatttaaaaattcttaattagtagaatttatcagaaaaatgaacctgtatgctaactgtacttggctaataaagggtttccaaacaattctttgtaactttttaaattagtgcgtagaactataacagataaaactgatcagaactagtatagcagttctatgaataagaaattctatagttcttaaaggcagttaatgctcctcccgttttgaacaaagcaagtaagcgtagtaaatcttatcccacttttaaaactagtgtaatgaaacatgaatctagcttgtgactgatatatcagaaattttcaattagattcggtctattttagtatagagtatatctgataaattactgtagagatattgatattgatgttcctcaaaaattttactccattttattggtcaggacttgttgcgccttgaaaaaaattaatccaatttttattcttttttgctcttcctccttgcttgtatgtcattgtgacctacgtatatggcatatgtttttctaagcaaagtgataattttacatcagggataattgaagcaaatgaatgcttcaattcatctccctcaagaaacgatgaatgaaaaagtctgggttaccaaatattttgaatagtttatgtgattcgcttctgtaaatcagtgagagaaacttactgattttcttgtgcatgtggaagttatgaggtggttcataatgattatgaattaattgaaatgaatcatataccaaaagaaatgattcatataccaaaagaaatgaatcatttcttttggtatatgattatctaattgtataatagaaataatttgctttattttccattggtttttatagtttcttataatcagtatagtttattagtaaaagaatctgtactaagctttaaaaagtatttgggtagctcattgatcaggtattttctattttctttaaaaactgattgttaaaatttgtatttagtaccatgatcagaataattaaaaaaaaaacaaaaacaactagtcactgtgaatgttgctttgctgtcttggaattatagtagatattctggctttctcttatttatgcaatttccaaatcatggaagtattgtagagccaggtcatagatgtagcttgttttgaagtcaagtgcattcctggagatccggttttgaaatgggtcactgtaaggtgatccctcttctttggacatcaatagaaaccatcaaatgagaggattaagttggtgagacattaagtgtgtatctttttatagggagtgttgaatgtgtgatgctagtttcaaagcttgtagttgccacagtactgtttaaagactaacaaaggtggaaagcaataaataattattaaaatggtttctttgcagatggaatttttagatttaatgtgtttcagcttctttaacttttaataattaaagtcacagttcaacatggtttttgctgtaattcaagggtctttgttcacatgtatacattccttccagggttgaatatagatacctggacctttaagtaattagattttcaacttgttagtgggtcatagttctgtgtattaggtgttaatttgtatgttagtctattagtccgttgtcatgctgctaataaagacataccgaggctgggtaattcataaaggaaagaggtttaattgactcacaattcagcatggctggggaggcctcaggaaacttacaatcatggcagaaggagaagcaaacccatcctcttcacatggcagcagcaaggagaagtacagagcaaaatgggaaaagtcccttatgaaaccgtcagctatcgtgaggactcactcactatcatgataacagcatgagggtaacccccctgccatgattaagttacctcccaccaggtccctctcagggcacatagggattatgggaactgcaattcaagatgagatttgggtgtggacacagccaaaccatatcattccacctctggcccctcccagatctcatgttttcacattttgaaacacagtcatgcctttccaacagtccctcagagtcttaactcattccagcattaactcaaaagttcaagtccaaagtctcatctgaggcaaggcaagtcccttccacctatgagcctgtaaaatcagaagcaagttagttacttcctggggtcattgggtagataacacccattccaaatgggagaacttggtcaaaacaaggggagtatagaccccgtgcaaatccgaaatccaacgaggcagtaattaaatcttaaagttgcaaaaggatctcctttgactccatgtctcacattcagggcacactgatgcaagaggtgggctcccgtggccttgggcagctccgcccctgtggctttgcagggtacagcccccctcctggctgcttccatgggcaggcattgagagtctgttgcttttccaggtgcatggtgcaatctgttggtggatctaccattctggagtctggaggatagtggccctcttctcgtagttccattaggcagtgctgcagtggggactcggtgtgggggctccaaacgaccccacatttcccttccgcactgccctagcagaggttctccaggagggccacgcccctgcagcaaacttctgtctgggcatccaggcatttctgtacatcttctgaaatctagggggaggttcccaaacctcagttcttgacttctgtgcacccacaggcccagcaccacttgtaagccaccagggcttggggcttgcactctctgaagtaatggccagagctgtaccttttagccaagactggagctgaagcagctggaacgcagggtaccatgtcctgaggctgcatagtacaggagccccagggcatggcctaggaaaccattttcccctcctaggcctctgggcctatgatgggaggggctgtcctgaaggtctgtgacatgccctggagacattttccccattgtcttggtgattaacatttggctccttgttacttatgtgaatttctgcggcaggcttgaatttctccccagaaaatgggattttcttttctattgctttgtcaggctgcaaatttttcaagctctgcttcctcttgaatgctttcctgcttagaaatttcttccaccggataccctaaatcatttctctcaagttcaaagttccacagatttctagggcagggccaaaatactgccagtctctttgcatagcgagagtcacctttactccagttctcaagttcctcatctccatctgagaccaccttagcctggacttcattgtccatattactatcagcattttggtcaaagccgtacaagaaatctctaggaagttccaaactttcccacattttcctgtcttcttctgagccctccagactgttccaccctcttcctgttacccagttccaaagttgcttctgcatttttgggtatccttgtaacagcaccccacgctctgtgtaccattttactgtattagtctgttctcatgctgctaataaaagacatacccaagactgggtaatttataaaggaaagtggtttgactcacagttcctcatggctgggcaggcctcgggaagctacaatcatggcagaaggggaagcaaacacattcttcttcacatggcagcagcaaggagaagggtcaagcaaaagggggaaaagcccctcaaaactgtcagatgtcatgagagctcactatcaccagaacagcatggaggtaaccacccctgtgattaaattacctcccaccaggtccctcccacaatatgtggggattatgggaactataattcaagatgagatttgggtggggacacagccaaaccatatcagtctgaaaatacagtcatattctcatcaccttcttcgtcattactggggggttgtgtttctgttaccttcaactactccataagaaatgtaccaaaaactcttgacagttggtcttttgaaagcttctgcattttaattcagtcatctggaatttgagtcttcttttactcttgtatttattagacccttaggtaagaggaattaaaataacagtgaccttgtgtctgctgtgtcaggtactgtgtgaagcactttatatacataaatactcgttatttcaaatgtacgaggtatgtgattttcagcattttatagacatagcagtaaaactgagagaaattaagtaatgtggctgtggttatagactgtagtcgtcagcttttgctggagcaacatacaacccccaaatttcagtggttactacaacagaccagtcatgtgcagttcttctggtatcagcctgtcttatgttcttgacaccacatatcttgttctggggctgagcagaaggagcagccctatatagggcatgctgttctcaaagcagagggagggcagaagctcaaggtggacagagccaaaccacacaggcaaccatggtatggcatgtccacttacattccatggccagagcaagtcctgtagccaagccttaagtcagtggggtgggaagtatactttacccacagggaagagtgacagaagcagggagggaacaaataatcgggaaaacatagtagtggggacagaatttgaacctaagagtcaagaagatagtgcagaatttaatgcaaaaccgaatgcagaatttgaacctcagagtcaagaacataattaaccactgagtagactgggaggttttttctaatttttaattttttattgatatataacatttgtatgtttttatggagtacatgtgatattttacaggcatagaatgtgtaatgatcacgtcaaggtatttaggttattcatcacctcacttaaagagctgaggaggaaggagactgacagaaggatgacaacagcaagagaaaggatataaaaatatatcatagtatatactagaaaactcatgatctgagtaatggctctgagttgtcagattaggttatattcagattgctgtttttaaaagactcactagaatccatgagacactgctaaaatcagaatgcttttgttacttcaaaattaatcttaaaaattcagtgaagtagaatgtagtcccaagtgaaatgttatttgtgaaatttttcctgaaatttttgtgaaatgtcagtgacaaatttgggggtgggagaatttgtgttttcatttatactcttaaactgtgtgtgtgttttattttatttttattattatttttttgagacagtcttgctctgtcacccaggctggactgcagtggtgcaatctcggctcactgcaacctctgcctcctgggttcaggcgattctcctgcctctgcctcctgagtagctggggctacaggtgcctgccaccacacctggctaatttttgtatttttagtagagatggggtttcaccataatggccagtctggtcttgaactcctgaccttgtggtctgcccaccttggcctcccgaagtgttgggattacaggtgtgagccaccatgcctggcctattttttgagacaggatctcactctgttgcccaggcctgagtgcagtggtgcgatcatggctcactgcagtctctaccttccaggctcaggtgatcctcctgcctcagcttcccaagtagctgggactacaggtgtgtgccaccacgcccaactaatttttatgtgtttttgtagagatgaggttttacaatgttgcctaggcgggtctcgaactcctggactcaagtgatctgccaccttcggcctcccaaagggttgtgattataggcgtaagccactgtacccagtcatgtattcttaaactttaaacttgggagagacttgagttttatacctgtgttaatatgaaatgagaaaaccttactggttattggaacaaccagaattaacatgaaatgagttttctaaaaaccatattttaaaaagtaggttacatattcacatatttcaaagttgtgcaggtacaaaggggcataataatgaaaggtctccctcccacgccattgcttttcttgaatgctgccaatgttctggagattaatatatgggcacttacaaatttatatatagaaaagaaataacgggtcaaatgaatgagaaagtagaagataacacatttttattttttcccttttacttcaggcacaacaactaattctttagatctgagaggaatttgtttttaaggctctagatgtgaaaaaaggaatgtttaatagtttatcttaggttttatttgaattggtccaataagtagtttttaaaagcaagtaaactctttttgtcttttaacttcaagtttaaaccttgattacaaagagtgatcctagctctgctgggagaagtattatagatacgatctcgtttaaattcgtggttaccatcacatcatttcattatttgtttttatctgggatcaaactggaatgtgaattccacaggctcaggaccctctcctatttgtttttaatttcctgttgcctagcataggtcttggcctggcagatccagaaaatggcttattgagttaatgaaataactcagtaatctagacattcttggatcactatgttgggcttgaattgtttttcctgataacatttcttttggcaggagggtctcttgctatctgcagtagcatccaaaaaaacccaattttcaggattttgtcttgcagtgtgttactgttgtgtgcatcacagataattgttgtcaagacattaatgaatatctgatttgttactcacatgttatgtgagtactaatggcttgtactaatgacttttgcccattaataaaggatagcatctgttatcatctgaggtacattctgttgagagtgtttcaagtgttactctctttttttcccctttggaattggtgttttcctcttaacttacattgttaatggaagaagagattggaagtgactgagatagactatcattggaacatgagagtgccagctttacatgccgaaggatctcattttgcaaactcgtaatttctttcaggaggaggcaaaacagattcagaatctgcagaaagcaggcactcgtacagactcaagggaggatgagatttctcctcctccacccaacccagtggttaaaggtaggaggcgacgaggtgctatcagcgctgaggtctacacggaggaagatgcggcatcctatgttagaaaggtagttttgatatttgaatatcggggggatgcttttgggacccacttggtggtcatctagtctcctttgatgaatgaatcataaaatacaaaacagggtggaacttcatccatcctgtacaattcttgggtactggaaaacaggtttctgtaatagcatgctgtcagaggaaataactaatagtgattatgaactagtgaataattgcattttggggtttgttatttccttgcagttgttttgcagtagaaggaggtgggcggtattgctttttctcttgaatcgtgatgtcctttttttgctatcctattaaatgttgtggcttttaaccttttattctacgagcctcatttgtcctgtgttctcctcttcctcagagccaggctattttgagttatgctgttagccttaaaggggaacagaattgtcctggcacttgaggcttgtgaagctaacagatcacagatttttaaaatgactaattattataaaatacttagttttgcctcagaataatgaccttggtccaggtgttttgatttgtttctttagttgttaactgggaaccaagtaccagactttatatttaggcctggctgtaggcaaggggattaattagtcaatacttgttgagtagtttatggatcaaagatagtacaagtgtgttgtagtgaaacactacaaagcagtcttgtttaaataccataatgtggcttgacatttaattgaagcgcaggttgcaaacgtgaaatgtttttggtttatggaattgtcatttgaccttcagttcttttctaggttataccaaaagattacaagacaatggccgctttagccaaagccattgaaaagaatgtgctgttttcacatcttgatgataatgagagaaggtaggaacaggctctttcttaacactatttttcaagtaagggtgtgatcccaaattgttttcaacacttgttgcaagttttagagctcttagtaattgttcaccagatgacagtctggggtctttaattctaagcttaatgtttgaaattcacggaagagacatgtgaaatgtaacacgaggccttctctcttttgcagtgatatttttgatgccatgttttcggtctcctttatcgcaggagagactgtgattcagcaaggtaagggcctctggagcatgcaatattgttacgggagaggaggcgagactagaggatttttttggttttgttttattgaagtttgttttcctctttgatcctaccacttttttttttctgttatactattggatttttctatttcttttaaattaagattttctgagatggacagaacactttgtattgggaactaatatttttgatacagttttgtttataatttaaaggaaatgcctacattgtcttaccttgaatgtcatatagaattgcagaatcatatatatctctcatgttctttatattgttaatcacttttaaagtaagaaataaatgaaacacctacattcttcattgtatagccctgtctattaaaaaggttctaggacttctatagattcttactttgcctatatagactaacatggatctaactttttgactatcttcctctttttattttcttatttattcttgacattttatgagtgggtatatattttcattttgtggcagcctgataatttgttattaactatttgagttgtttctaatgtccttgttataaatgccatagcagttaataactacacatatgtagcttttaaaaatttttttcagaggtattcttcaccatgagatgactaaaaaaattttgattaattctatgacttttaaaatatgttgcttgattttctttcccctgaaagattgtgttagtttgtaacacactctcacagtaccactgtaaaataagtttattgttttgtaataattttgataatttctttctttaatttggaatatgcttctaacttttttaccctcttttaggtgatgaaggggataacttctatgtgattgatcaagga

SEQ ID NO: 87 - DNA, 23220 bp, Homo sapiens
actgctcagaccctccaggggcagggcccaggattgaagagggaagccctgctccacacgtgttcatcaggaaggacccacagactgctgctcctggaggcctctcggtttatggatgtgtgtttgttccataaaccctcagagggtcacctggagacccgctaaaatgcaggttcttgggccacatcctagaccttctgaccgacccagggagtggggcccaggaagctgcatttgacagatatccccgtgtgatcatcatgcacacaggagtgagagaaccagtgttctccccgggcagaagggaagctcgtgtgcaggacacctcacacctcctttcccattcccctgccaggctctccctgctgacattgtttttgcgggagagctgtgaattctgaagattaggttgcttctcaccccaagctccagaagtccaggctgagccaaaccaagcttcaagttgtgagtattttgaataatgagcccttgctcattaactgatcctgtactgaaatagcccttgctgtccatgctgtaccccggtggttctcaggccgggctgcacgttagaatcacctgtgtgggtggggggtgtccaggagggggatggtgagggaggtttaaaaatacccagagattctgattccactggcctgtgcaggggcccggacatagtattttgaactcccaagatgcttctaatgtgcagccagcgttgagaacatttgctgtaactatgaagagaatatttcatgtaaggtacattttcttattctcagatcagctggctctttccatcccaggccatgagcaaattgcaaggggtttctttgggatgtgtgtgcatgtatgtgtgaatttagagttcctttttacatggcatcccacactggagtcaactatgaatgccattgcagattcctccctcttcattcctacatcaccctcttcctcttctacttggctccaatcctgcttcaggatcacctcataccctgcctgacactttcagtgtcctcctgacaactttgaatgactttgttcatcacggcatatctactggtcatttgcctctgataagaggtcagttctggtattggtctgcaggatccaaaagaaaaactcagacactttaagagaaaaacaattagctggacttgagaaatcctcttaagaccaaactcaggtccagtctgctctgactggagtttgactctttcttaatctggtattaggcatggtttaaaacgacctgtaacgttgaaaatatgctcttcagagccagaaggcagtccctgtaggtgagggggacccattttcccccatctcccaagttaaagcatggatctgtccaaattttaaatgtgtttcatgattgatttggcacctggtggagggctaaacatgtttgcagtaagaaatctcttaatttctgaatccatagtcattggaaaaagataccagatatttgttactctttccagtgactgtaaattgggagagtttaacttagtaaaaataaagggtaacgaaagaaatcaatggactatggaacttgaccccattatcaaataggacagatatcctggggagagattacaaattatgccctcttacaaatgcatgaaacaatagtgtcatttaaaataatattctatctgatgggaatgtgtgggccttatttggatcctcattcaaacaacaacaaaaaaaactttaaaattttgagacatttgggaatctgatatattttgatatttgataatattttggaattctcacaaatagttgtgattatgctattgtaatgttaaaataattcatatttttagagacacctactgaaatatttatggatggaatgatatgacatctgggatttgcttcagaatgatatgagagagaggaagtggatgagaatcgtgttgaaataagattggccatgagtcagttatagttgaagctgagtgataagtccatgggggttctttatactattctgcctttggtatatgtttgcatttcttcataataaaaaagctttcaaaaagaatgagatatttttattactaaaaattgtgatgaaatcttacccaaagttagtgctttgcattagcttgcactggcttacagatgctgaaagtttgagaaatgctgcctaaatggtatgcggtcttgaatagaggaagtacccaattcctaaaacatctaacaaagaatatagaagagaagaaccatggacaggtaaagttgtcctgtaaatgttcttaatagaggtcttcattgtgtgttcagttgtcccggagggctgtgtatttaagagtattttctctgtagaggttaggaagcctgagagtgagaagaccaaagacttcagctttgaggttctagtggggtataaatcttaatagagagggctgcggatgcattgaatgactgactatggcttgaataaatacctgttgttataattcctgatagaatctgcagtattcatttatgtaaatagagaaggaaattaggttatcaaagaactatgcacctgcacaaattgtttggcttcaaggaattgcttttgctgaatttcaacagggtttatgcttttgtgcccatattaaggaattggattgaaagaggtcaggagatatggacctacaaaaatgcctattacatttgtctcagaaatgtcccacagaaccccactcccccaccccagtcctgtagggtgagctttttcattcaggacccagacatggagcctgatagcctgggtttgaatctcatttctgcatctcactaactgtagtcttgggcacattacgaacttactcttgaattcttagtttccttatctgtaaaatgagtgttataataatgtccaccccacgagattgtcaggatcaaataagaaaatgtcagagaaacacttaactcgggactgggatcacccacatcccctctggtctgtgcattagaaaggcagagttttcctgacttgtatgttctgcttggttatatttctcatttccttggctcctaggactcttggctcatgcccgcttgtagtaactgaataacatcatatgatagatgtttccatgtgctcatcttattgctggctctatcaactattttccttgccttcttcattgcttattttgaccatttcttttcgtcctttattctcttattctaataagcttgctcaacttttttatgagacaagggaaggagtaaataactagctaaagaagcaatgatctgtgattgaggccgggggagagagaggggttgagggatttgtggggtgaatagcagaggactttaatggaggaactcctctagaataatgagggacagaaagagccagtagaaaccacccactggacctcttaaaaatcactaatgttttatgccttctttggtattcaccatgtatactaccatgtttcctatgtaatagcaaaccttaaaaccctaaaaaaacaaaaaaggggggctagttgtttacttgttttgatgaccagcttgagcaggaaaaggagggatccttcttcctggatccacagaactggatccagcctggttttcttccataactcagtggcctctgtctacttgtacttctgttccaactgccgtcaaagcctttcctgagaagagtcagtgttttcctggcctacaggatgctgactactgacaggtgcacagtgtgcaccaaacacaccactcgcctcccctggggtcaggaagatgagtcacatccatcagccctggtggcttggagccttggatctttctagtatgaatccaggagggcatagcctggggttctgcagtgtggaatactgcaagggcttttatcagggagccagccaaggccttggtgactgatatctcccctaataacatctggaaaggaaattgctcactagagataaagaagagaatttctgctcttcgcaacggaaaattattacagacaacattagacctcaaaaatgagcttcctcaaagtacgcatttgtacaactccccccgaactccttgcttggctgtttggaaggttttgtagaaaaacagtaacctggccaggcgtagtggctcatgcctgtaatcccagcactttgggaagccgaggcggatggatcacctgaggtcaggagctcaagaccagcctggccaatgtggagaaaccccatctctgctaaaaatacaaaaaatcagctgggcgtggtggtgcatgcctgtaatcccagctactcgggaggctgaggcagaagaatcacttgaacctgggaggtggaggttgcagtgagccgagactgcaccattgcactaggcctgggcaacaagagcgaaagagaaagaaagaaagagaagagagagagagaaaggaaagaaagaaaaagaaaaaggaagagaaagaaaaaagaaagaaaagaaagaaagggaaagaaggaaggaaggaagggaggaaggaaggaaggaaggaaggaaaacagtaacctaaggaattttctttgaaattcagtgctgccatttgtttgcttatggagtggcacagagcccacagcatttggctctgcctcagaggcaaacatggctacagcagccaaagagaaacacaaaggaggacactctaggaatggaacctataagtggggacttctgggtgcacgtaagttcttggagagcacaggcaaggcctcctggtagcatcacctgggccagggcccttctcagagaaaaagggactgagcaatgtggatgctttcccagaaaactgatttcattggcctacaacgaggtttatattttatttgtagaagtcttttgtttatttttcttctttatctttcttctctattttaagtgagtagaaagttaaaaaagcctactactatacaagaagtcagatttagacattgaaaaatacatacaatacgttggtaagtgaacaacaataaaatcacaaatatagacaaccacctttttgtagtttaaaaaaatcagtaagagaggatgtgaaatgatttatgttaaggagttaatgattgtctcctttggaaaaaggagtggatttggggtgggaggatgaagaaggagaacttgaatgtcttagaatttttggaaagagtacaatataatttacaaagagtgagagagactcaatttaggagccctgggctgggaggattgctaacactttcctgtgaactcaggaaaattccttgaggttggaccatctgtcctctgctgcctccgtccataaggcaagcccaccgccacccatcaggatccagggtcgctctgccctgctctgtgtcagagcctctagccctcctgatagcacagccactgcacttgacggcacaccgtgcaccccacacacgttgtttccatctaatgcccacaacaatattgaggcaagtgtagcggcgggctcgctctacacctaaggaacctgaggttcaagagagaaactagaggcaagggaaggctgtgagccaggcccctgcatccacgcccagcactccttctcagcccctgtgtcctctggcaggagaaggttggcttggagctacctgcggagggcaaggagaagcagaggaacactgcctgggacactcatgagaagcacatcaccccatgtcacgttctgtgatggttaatttcatgtgtgaactgggctaggccacagtactctgatactttgtcatatgttgtctggatttttctgtgagggtactttttagataagattaacatttaaaccaatagacttggagtaaagcagagtacccttcataatatgtgtgagctttatccagctagctgaaggccttcgaggaaaaaaaactgaggtccccaaagagaggaaagaagcctctaggccctcctcagactcacatcttccctgggtctccagcctgcccatctgccctgcagttttcagacttgccagccccgacaatcttatgagccaattctttaaagtaaacctctctctctatatatacacacagcctattggctctgttttcctgaagaagcctggccaagacactttgtttaaagcagaagggtgagtgtacacatttaatttaaactacccttcactggcattaccacacctagcagtgagcattgcacatcttatatgcttcataaatatttgagtggaaaccaacaataaggctaaaatgctgaatggctttgccagatgtagtatttatttaaactattgttttgttttcttatgagtcattgaatgggaaggaactgaaattgtcttgaaattgtgagtgggtagagagggctgggagcaatgggtggtgaggtatcccccatttctaaagattctgtgacccacattattccagaaattctagtttgtgttttgtctttttctttgttttctttcttcttttttgttttttcttttttttttttttttttgtagacagagtcttgctctctcacctaggctggactgcagtggtgcaatcataactcactgcaacctggaactcctagactcaagggttcctcctgtctcagcctcccaaggaggtatagatagatacacttggctaattttaaagttattattattgttttgtagggacagggtcttgctttgttgtccaggctggaatgcagtgacgcaaacatagctcactgcaacctggaaccctggcctcaagcaatcctcctgccttgacctctcaaaatgctaggcttacagccatgagccactatgcctggactgtctttttactcagagtaagcagggacagggaagaccagagggagagccctaggacaggcaatgttggcgtcttcccctaccctagctgccctgagcctcttgctgtgcaggtccctccttagggagaggcctgatcccattttgtcattagtcacaaacaccacttactggccatttgcgctgggccctgcactgttccctcaggacttcctcagtatcctctgtggcaggcactattgcttccagtttaaccctgggggaagctgaggctcagcaattttgggccatcagcccaagcagcacaggaacatagtccaagcttgtcttgaagctactgggaagaggagaggtgtctaggaggatgtgccctcgctttccttccctgggatccccaaccacctaaccccactgccttttctttttttctttttctttttttttgagatcaagtcgcattctgttgcctaggctggagtacggtggtgcgatctcagctcactacaacctccgcctctttggttcaagtgattctcctgtttcagcctcccaagtggctgagattacaggtgtgtgccaccatgtctggctaatttttgtattttttattagagacaaggtttccccatgttggccaggctagtctcaaactccggacctcaggtgatcctcctgccttggcctcccaaagtgttgggattacaggtgtgagccactacatccggccccccaccactttttgaagagaagagcctaacaaagggatcaagactttgtatcctagcatcaccatcctcagaactccatcctaggtatagaagagtcctttttaatcccattaacatttctggcttagcgtctccttaaatgagtttcattcaacacaacatttcatttcccacaatgtggcaatctcatcccctatccccttttacctggaacactcccttttccccagcacttaactcagcagtcgcctcctccaggaggctcccccgtcccctcctctgccctctgccttcctccatggaaccctggcagtcccccagctccacagttgttgccttgcatggtcaccagggtaagaccttaagggcagggacactccacagtgtctggcaaatgatggaatggacagtggcctggtccataggccaagctggaggcaaggtggcctgtggcctggaacagtgactcaggcaggaggaatgtggctcaggctgcctgcagctgcgataaggaggacaggatggggctctgcaaaggacatcctgcagcagccaggggactttccatgcagaagcacatgtggaaacccacagcctgagagaatcctggcctgcatactgcacagagtccttgagggtgagcaagaagaagactggaaatgccatccctctgtcaccaatccacagtgggtttggggaggaggcatggccaacatccactgggctgcacagacagttttattactaccccacctggctcctgccttctggggccctgcagcccatgaattaatccctttccaggctagcctggggtacatccatcccctttggctcctaacccatggagtcaagcctcgggcacatttctcctaccagcctggtttgggccatatctatgtaatgcttttgccttcatttacttaggttgctcccttaaacaggctcacattttaaacataacctctgcctcctaagcaaatacttatattcataaattactcccacctgaaccaccaccactgccaccacccacaggattcctgggcttccttgcagcatagataaaagcttttttgggcatccacttaccaggcactgggtgggagcaggcagcagggcacatcctccctccttggaagcaatatttactcagcaattctccactcagcagtgtaaatcactgtggcttcccagcaggcatatgatctctgcctggtcgggtttctctcccttttccatgactgaatctgaagctcaagcccctttccccacagcctctcccacatatgcctggaaactgaggtctggctcatccttcagggagctccatgcttccctggtaaggtaaaaaaaaaaaaaaaatcatcctattaatgcccacagtgatgtcatgttgacaccgtgtacccttgataggatgtgatgagaatggcatttcacctctgtggtctccttcccaacacccaatagcctaattatgagaaaaacatcagacaaatcccaactgaaggacattctaaaaagtacctgaccagtagtcttcaaaactgacaaggccatcaaaaataaagtctgaaaagccgtcacgaccaagagaagcttaagcagacatgacaactaagtgaaatctggtgtcctagaagggaccatggaacagaaaaaggacacgaagcaaaacataaggaaatctgaataaactatagacttcagttaataacaacatatcactattggttcgttaattctaacaaatgtgtcacactagtgttatgatgtgaataataggggaaacttggcgttggagctgtagaactgtgtagtatctttgtaacttttctgtaaatctgaaactgttttaaatttcaaagtttattttaaaatcataataaaggttactgcaggaaagaatggagcagcaattgcttggtcaggtgtcatggaagaaaatcttactcatgaatcccaaatgctgcctttcaaactttagttacgataaagtatcaactagttactaagtgggaaatccactttctttctttcttttttttttaactgctattttaactattacacaatccacaagaactattattaatatgtactttaaaaattctggtttgacttattctgattcaaaatgtaatatattacttgttaggacttgaacagattgtgaaagttgctcctaccttaagaaatagtattatttgcagaacacccctttaaagagtttttggaaatgactcagaatgcccagttactccaccacattctaccctgtaggaattgtgataaagaagcagtgctttccggtgatagctaggtgcaataaaaccaaacaagtagattccatacctcatcgtgcatatgcaaagcctagcccattctttcctgcagtagttggtgaggttatcaatatgtgtctgattttcatccatcaaatgtttcttgagctgccattgttttatggggagagggacgatttgagaaggggagagatgctctcaaagggaaatttgggaagaagcttctcttgttctgagtacagatatctcaaaatataacattagtgtcttgatttgcatatttgtggtacataacacattgtaataccattcaaattataaaatactttctctttttttttttttttttttttgagacagggtctcactccatcacccaggctggagtgcagtggtgccatcttggctcactgcaacctccctcttccaggctcaagcaatcctctcacctcagcctccctatagctggactacaggcacgcaccaccacacctggataatgtttatattttttcgtagagacagggttttgccatgttgcccaggcatgcctcgaactcctgggctcaagtgatcggcctgcctccgcctcccaaagtgctgggactacaggcatgagtcaccgctgcacccagccataaagaaataaatggaaaaaaagtcctggcaacggtctttgaaaaactgaaatatactccatgaaccctgtcatgcagacctgcccaactctgcaatcttagcatctcattgttttgttttccctgtcatgtctgcagctcatctgtctcttgggcttcttcctatctcggtcctggtccccatcccctgtgttttactctttgccagctttttttctggttttatgttcttccttgtccagagcacgaccttcatctgtgtatgagtcaacacagaaaacctgacccaaaaaggccaggtccaggaagggtgcagctcagcttttactgagtgtcctgtatgctttgtcaagtcctccttacgggttgtctcatttagttagcaatggatttggcatttcaagaggaaacaaggtttagaagtctcacaaaacaatcagccaatcaaagaagccatagagctactgagtgacttcaacatctccaaactcatttctgagtatggcccacacttagagaatgatctgatagtattcatttctctgggctgtttcctcattttcccttgagtagtaactagtgaatcaaaggatccccgagttaagcaaaatccaactcatccactcctagctgaaggttctaatgctgctcatttccataaaacaaagatttcccagagcctgaagtggcttcctgttggctacttaaacagcacaacatatggtaaaatcagactattagtttctataaaaaagtttatatatatattaaaaaggcctactacaattttgattggaattgcattgaacctatagatcaattggaaaagaatgagtatcttaatattgagttttctgaaacataaacttgactcatccttccatttatttagatcttctttaatttctctcagtaatgttttatagtttccagtatagaagccttgcgcatattttatcaaatttattcctaaatattttatggtttttggttgctattataaatggtctttaaaaaatttatttacaagcggtagtattcacttttgtgatatatatttctatgatagattctcttttttttttgaaaaactgggatataaattacatatattaaaaagccttttaaagtgtccaacccagtggtttttaatatattcacaaggttgtgcaactgtcacgactatctgatttttagaacatttctataatcccctcaaagaagcccccagtctattagtagtcatttccccctccctctagcccctgccaaccactaatctgttttctgtctctgtggactgagctattctatttattttgtataaggagaatcatataaatagaatgatataatatgtcaccttttgtgtctggcttctttcacttagaataatgttttcaaagtttatcttcattatggcatatatcagaatttcattcctttttatggttgaataatattccattgtgtgggtaaaccatattttgtttatccattgtccatcaatgacacttgagtttctccctccttttggctattataaatagtgctgctataaacactcatgtacaagtgtttgtttgaatatttgttttcagttcttttgagtatatatctaggagtgaaattgctgagtcatattataattctgtgtttaacttttacaggaaccaccaaactgttttccacagaggctgcatcaattgacattcccactagcaatggatgagggttccaatttttccagatgctcaccaacacttgttaattttggttttgttttcattatggccattctggtgggtgtaaagtagcatctcattgtggcttgactgaatttctctaatgagtaatgatgttgagcatttttcatgtgcttattggctatttgtatatctttgttggagaaatatctgttcaagttctttggccattttaaaattgggttgtctttttgttgttgaattgtaaagttctttagatattctgaatactagatccttattaaatatatgatttgaaaatatttttcccattttgaatgttgtcttttcattttttggatagtgtcttttggtgcaccaaacttcaaaaattttttcgaagtccagtttatcaattttttattttgttgcctgtgcttttggtgtcatatccaataagtcattgccaaatccaatgtcacaaatatatttttgctgctttcttgtaagagttatacagttttagctcatatgtttaggtctttgatgcattttgagttaatttttgtatgtagtgtaggataagggtctaacttcattcctttgcatgtaaatattccatttttctggcaccatttgttgtaggaactgtcatttccccattaaatgatttggcatccttgtcagaaatcaattgtccatacatgtgagggtttatttctgggctcccaattctattccattggtctatacatctgttcccatgccagtaccacactgtttgattaatgtcgatttttagtaagttttgaaatcaggaagtgtgaatcctccaactttgttcttttcaagatcattttggttatatgggttaccttaagattccatttgaattttcggatgggtttttctatttttgtaaaaaatatcattgggattttgataggaattgcactgaatctgtagatcgctttgggtagtactatcatattaacaatattaagtcttccaagccataaacatggactgtctttccatttatttagattttctttaatttctttcagcaatgttttgcagtattcagtgtacaagtcttttgcctcctttgttaaatttattcctaaggatgctattctttctgatgctagtaaaatagttttcctaatttcattttcagatcatgcataaccaccaccataaacatgattccaacaccccagagtattccctcagtctgaccttttgtaaagtggtgctttttaaaatttaattttccaattgcttgttgctagtgtatagaaatacgactgatacttttatattggccttgtatcctgagaccctgtaaattcacttattagttctagacagttttaattctttctttccaatctttatgcctattatttctgttttgttttgttttttaaacagggtttggctctgtcacccaggctggagtgcagtggcttgattccaactcactgcaccctcgacctcctgggctcaagtcatcctcccacctcagccttccaagtagctgggactacaagcatgagccaccacacccagctaattttttttcttttctttttctttttttttttttttggagggtgcagggagcagagtcttgctctgttgcccaggctggtctcaaattcctgagctcaagtaattcatacaccttggcctcccaaagtgctaggattacaggcatgagtcaccttgcctgactattacttctttttttgagacagtcttgctctgttgccaggctggagtgcagtggcatgatctcggctcactgcaacctccgcctcatgggttcaagcgattctcctgcctcagcctcccaggtagctgggactacagatgcatgccaccacaccaagctaatttttagatttttagtagagatggggtttcaccatgttggccaggatggtctcgatctcttgacctcatgatccacctgcctcagcctcccaacatgctgggattacaggcgtgagccactgcacccggcctattattcctttttttgccctattgtcccagtggatagtgatgtccagtagagcgttgaatcaaagtggtaaaattgtgcgtccttgccttgttctccacgttaaggtgaaattttgaagatttcattattacatatgatgtaagctgtaggtttttatttatttatttatttagagacagggtcttgctctgtcacccaggctggagtacagtggcatgatccactgtagccttgacctcccagtctcaagcagtcctcccacctcagcctcccaaatagctgagaccacaggcacatgccaccataccctgctaattttttattttttgtagacatggggtcttactatcttgaccaggctggtctcaaactcatgggctcaaatcatcctcctgcctcagcctcccaaagtgctgggattacaggcatgagccactgcacctggcctaactgtgggctttttttgaaatgtctttttcaggttgaggaaggtcccttctattcctagtgtactgagagtttgtatcatgaaaaggtattgaattttgtcaaatgttgttcctgtgtctattgagatggctgtatgggttttctcttttttctgataatgtgatgaattatatggatttattaatattgaaataataaaatgacactgcattcttcggaaaaacttcacttggtcatgttgtgttattctttttaaaaaatgctgggttcaatttgctaatattttgttaaaggatttttgtgtctatattcatgaggaatattggtctgtggttttcttttcttgtaatgttttttgtctggttatggtactaggattgtgctggccaaaacatttaaaaattgggaaatgatttcctcctcccctattttctgaaacagtttatgtgcaattggtataatttctgcattgcaagtttgatagaatttagtagagccatctgtgactgaagtttccttgcaagtaattgcacattcaattttttaaatcaacttggagattttcagattttctatttcttcctgtgtcagttttgttatgtcgtttttttaaggtatcataaatatgtttaatatacttgcttggcatccatctttaggccttacataagttgtttgaaacccagccattccccacctcctttagcctagttaaaacttccccttcctgtgatggttatttctgatatagcccacttgttcttcatcccactgaccccaaatcccacacacctcatagctgctaaccgtgataaaacctaatgatcaacaccagagtcatgaaagtaagttcccctctttgcacatattttctttaaattagataatccacaatccctgtgagaaagcctaaagggtaacacctatggaccttaatataggcatagcctcataggtcctccctcctacccttttccctctccttatccttccccatttccctctccctcttccccatcacttgctggttgagctccctactacctctacacttcccatcagcctcccatcagcacccctaacttccctgggaactataagtaataaattccttctatctcatgcatttttggttacacttcttcatcgtgcctcacctgacacacacacttgaacctaactttaccctagtcaaggctctcctagacagtggatatcttggcttacggccaactttccagagacagccctcaaaaccaaattagatcaggtgcagcggcttacacctgtaatcccagcactttgagaggccaaggcaggcagaccatttgtggtcagaagttcaagaccattctgggcaatagagcaagaccctgtctctaccaaaaaaaaaaaaaaaaaaaatacagcacaaggaatttgcctatcttgtctaagtcgtcagtattcttgaggataaagttgttcaaaatcctttatttaatgtttccatgtctgcagcattgccaataataacctccttttgttcctgatgtttggaatttattttctatcttgttaacttgctcagtctgatgtcattttctatcagccttaattaaggattttctttaccatttcttggagtgcaaatctgctacagatgactccttttgtttatccaaaatgcttttatttttgccttgatctttaaaagatattttagtagtttatagattctgggttgcaagtgtttttctttcagcactttaaagattttgttccattgccctctggcattcgttgtttctgatgagatgtcagccctaattttttttatgtatataaagtgtctttttttcctttggctacttgaaagatttttgtatttaacttaggcttttcagcattttgattataaagtgcctggatgtgattttccttgtatttattctgccgtgacttgctcagcttcttgggtctgtgggcttatgtttgtctttgtgaactatcatgaaaagcttggctgcctctcattcacatagtcttcctctgtggccagcctgctcttcagcagactaggtgctggcctccactgggccttttgactcaaccatgacgggctcatcaccacctgaaattcagttaatcagggcttctttgcatctgccacttactcaccaaatggaaaattatgatttttgtttcctctagttttatcttgtgaccatgatggtgaaaaccttttgcgttcttcctcctaactctgaaggagaattcctggcattttcttatcctcctcattctgtatacatggagggattgtactttctaccttataaaagtgaggtgtggccatgtgacttgattaaccaatgaaatgtgaagggcatgaagtatcctctttctgggcagaatatttaagccttgtgtgtgattgggcaccatcacttctctctgtgtgatcagctaataacagccccccagagaaatccacatgttagtctctagaatttgtgaatatgttactttacttggcgataagtatgctgcaaatgtgattaagaatcttgagataggcagattatccttgattatccaagtgggttcaacatcattacaagagtcctcataagagaaagtagaagagtaagagaataagagtaacagaataagagaagatatgaccttggaagcagaagttggagaaggagaatttggagaaagagaagacgctacattgctagttctgaatatggagggtggagtactgaaacaaggaatgcaggtggtctctagaagatagaaaagacaataaaaaggattctctcctagggcctccagaagaaagacagccctgccaacatctctttattttattttattttatttttgttttttttgtttgagagagagtcttgctctgtctcccaggctggagtgcagtggcatgatctctgttcactgcaacctctgcctcccaggtttaagcgattctcctgcctcagcctccctagtagctggattacaggcatgtgccaccatgcctggctaattttggtatttttggtagagatggggttttgccatgttggctaggctggtctcgaactcctgacctcaagtgatccacctgcctccgcttcccagagtcctggtattatatacatgagccaccatgcacagccccagcatctcgattttagttcagtgaggcccaattcagacattgacctctacaactatatataatacatttctgttgctttaagccacttaaatttgacattaatttgttacagcagcaataggaaacaaatatatgctgtcatgagaacagcaatgctcctggtgggaaaggctctgtcacctgcactcctgaaggcaggtgacactcagcaaagcagagcccccacctgaccatggtggatggagtatgagcaaaaaatggggctttggaggtctgggcgcagtgactcaagcctgtaatcccagcgctttggaaggctaaggcaggcagatcacttgaggccagaagttcaagaccagcctggccaacatagtgaaacacgtctctactaaaaatacaaaaattagctgggcaaggttgtgcttgcttgtgatcccagctactcgggaggctgaagcaggagaatcgcttgaacctgggagggggaggttgcaattagccaagatcgcaccactgcacgccagcctaggtaacagtgtgagactctgtctcaaaaaaaaaaagcaaagacaaaaggaaataaggctttgttttttttaagcaaccgagattttgcagatgtttgcttttatagcatagctacatgtcaatacaaataccatcaaataccatgtaaagaatttaaatctatctaactttgctgtgggacttgaaaattttttttcaatgggccctgaaccttttttcaggccctagaagtgatgaagtattggattattctggcaggaatcttacaaatggttgagaatgtataaaccaaaaagtactcaagacaagtctcaatcagtttagaagtttattttgcaagattgaggatgcacgcccaggagacaggtctgtgcctttcttcaaaggtgattttgagagtttcaatatttaaaggagaaagggcagatattggggaaagaggaagaaattttaaaaagctgtaggtagataagagtcaaacgattgttcttttgagtctttgatcagctgtccacatgtgagaagggtagaggaatagtcacttatgcattcatccagctcagtgaatctgcatttttacataagatgaaataagcatagggcagaggaagaatcaggtatgcatttgtctcaggtaagcagagagatgactttgagttctgtccttcgtcccatacccatgaagataagctatcaattcactttgtcagggtgaaattcaacagaactgttctagggtaaagatcttggggcccgtgagaaatttcctagtgggcaaattatgagggagataggtttgcatgacacagtttccagcttgacttttccctttggcttagtgagtttgggatcctgaggtttattttcctttcataaattaactcagcaagttggttggggactttgtgtgttgtggctcctcagttccataggggataaatacagagatttatgatgttctgctgcttctctcagggagtgggtagtttaactggagggagaatctgtggatgcatgaagcccagggagcaataggtggtatggatttaagtcacttcagagggccctgataacagtgaagaaaagttactatggggaaaaaaaaacttggtgcaagaagatagcctctcttaatcagtaataagttttatcaaatgttgctcttcagcgggtcagagagctacagtctccattttactttatttcagaacaagtcaaatgacaaaaacaaaacaccaggctgaaatcataggcttctacaagcaggtatgcttcagggtttgtcctggggccagtgtacatataaccctgtatttcctttgcttatctgtagaacagagtggtaaatgttctcaaagaccaccttatgattctatagtattgtaataaggacttggcagtttgcagaaggataaaacattcattgcactggatcctaaggtagcgaggaatgcattacattttttagagatttctcccataatcataggatacaaatcctcaaaaagatctaatggatcatggaatctaatgccctatgaggaccagagggtccagaaaaaccccgggggtgggagttgtcttctaggttctgagatgaataattccaggggctgcatggcaccgggttggggatgaagacagccagccgagtgagaaagagtgtgaaccagggccctcaaggcaagagatagattaagcagagacaagggaggaatgccctagggagaagaagaggggtccttagcatgaccgtgggttgggtccattgtcacaaagcctgttctgtctccaggtgcctggacttggagaaccaggaggtgaggggactgactacttgaagatcacatggaggaggagtctgatccaggcccaggtgggcatccatcctcttccttcttggcccagtgaagactatccgtggacccccatttacaagccttgggggcctttgcactagctcttctttctggttgtaaacctcttactgcacacgcccttggctcacaatagcgcctccttcttttctcgattgtcacctcccacacgaggattccctgaccacagctgtacctgacccatctaccttgccactgcccattctttttttttgaggaggggactgggggacacagtttcactctttcgttcatgctgaagtgcagtggtgcaatcttggctcactgaaagctctgcctcccaggttcaagtgattctcttgcctcagccgacccagtagctgggattacaggcgagcaccaccacacccggctaatttttgtgttattagtagagacaggatttcaccatgttggccaggctggtctcgaactcctgacctcaagtgatccccccaactcagtctcctaatgtgctgagattacaggcatgagccactgcgcctggcaccactgcccattcttctcttctttttccttttctgtcttttctttttccagggcatctctcccttcttccagcacgcagtgcaattttctttactctgctggtggctcattgtctatctcttcccaataaagtgcaaactcacagggtggggaccctctggtttgctcactgatggtctctagtgctgtacctgcctggcacagcttggggctccctaagaacctgctgaatggacaaaagggacattttcaaatattaacctgttgaaaacagcttattccatatccagttcaggtaactaaggaggtagtatactttatatactatcgtgacttaaattagggctgccaatgctatgtgggagaatcctgatacctatttgtggcctccaactaaatcattcttttcctttttttttttttttttttttctttgagacagtcttgctctgttgcccaggctggaatacagtggcatgatctcagctcactgcaacctctgccccccaggttcaagcaattctcatgcatcagcctcccaagaagctgggactgactacaggcatgcaccaccacacccagctaatttttgtgtctaacaggatttcgccatgttgaccaggatggtttcaaactcctgacctcaagtgatccacctgcctcggcctcccagagtgctgggattataggcgtgagccaccgcacctgacctaaatcattttttatttttttaagaatatcgtgacttgaccaaaggcttgagtcttctttgctccctcctgctaggtgtggaagcagatatcccctccatggctgggtgagtgggctgcagaggatctaggttgtcatccctacccccacaggagtcagggcaggggtcacacatttctgtttaagcttcttcttgggttatccctcacagagggacaggagagcaaggagctcagtgttacagcatccactcccccaaccgccccccacctccctccctccccacaatacacacacccctacagagagcctctggggacatactgctcagacatctgccacaatatgtgtcaccccctcactgggctcccccagtgtaaaaggacaggcactgcaactcctgtcccatccatacttaggggcattgccagaggccaggaccagaggactttggacacggtgagacccaagatgctgaatctcgctgtcaatttaggatctgtttgcagcctcccaaggtcatgcccaattgctggaagaactcatggctacaactctctctctcacacacacacacacacacacacacacacacacacacacaccatggcctctttcctgaagcaggtggctctccctctggtctgcaacagcttctaagtttgccgagctgccctgcacttccaacccacatgctggcttgctctccattcagcagcagcaagagcagcaggcctctaattttggttgctagacacgttgtggatctttcagagtctgggtttagagacagacaccagggaggcacagtgccagagacagagatggcagctgggattgccaacccaggggcgggcttcccatggtgccatgaaaaagcgaggagacaaatctctttatgcctctgcctcccttcccttctccttccacttcttctcagactccacgtacggcatctcatgcaggtgccacagcagccctgcatagcatttgctgtatcatccccattgcaccagggagggaaggaaacagaggatgcctggtcttttcatataccatccacgatacaccgatggcccacctctccttctgtccagctctcaagcctaagggccagcacacagctcctgtgtctgcacatcaaccttggtgggagctgtagcttgatttggaaggaacctgcatagcataacatcccacattcttagctgagtctttgccagggcaggggtactcaaggtaccctgacttctttatggcccagtccccacccagagcagtgactgacgtggtgcatgagcagaccttaaccaaattgatgcccaaggaatccttggcctttacttaggaaagtcgaacaccgtttcctggggagctgctgtggactgacttgtgttaccccaaaattcatatgttgaagccctaaccccaaatgtgactgtatttggagatagggcctataaggaggtgattaaggttaagtgaagacggggtgctgataggatttgcgtcattataagagagcttgttctctctgtctctctctctcccctctctctccccccccccctctctctctgtcactctctgtctttgcttatgtgtgcaggcaccaaggaaaggccatgcaaggacacagggagaagggcagctgtctgtaagccagaaagagccttcactagaaaccaaatcagccagaaccttcatcttggactttccagccttcagagatgtgaaaaaataaatttctgttgattaaccta

SEQ ID NO: 88 - DNA, 316684 bp, Homo sapiens
gatggcgcgcgactgtttcccatctactcagaggctgaggcgggagaatcgcttgaacccggaaggcggaggttgcagtgagctgaaatcacgccattgcgctccagcctgggtgacagagcaagactccgtcacaaaaaaaaaaagaaaaaagaaacaccagttttctgatttcaccgaagacctactgcctcagaaactatgagggcagaacccagcaatctgtgctttctttcacaagccctccaggagttgctgaaatttaggaatcattgccccaaaaagtggccctcataatgatgccaggtaaggaaagacaacattattacctatgtgtggtgtgttaacattctttatgaaacatgtgtgaagacctaaatcgaagactttctccatgagatattccctaatcacattagtgaaataaaactatatttcctctacttttctactgctacagaaatctcccccagttaggatagtcccagtttcctatttatctttgtttttcttgcagtgcacagcatgtcacccagtaattgataagtttttttttttttgagacggagtcttgctctgtctcccaggctggagtgcagtggcgcgatctcggctccccaagtagctgggactacaggcgcccgccatcacgcccggctaattttttgtatttttagtagagacggggtttcgccgtgttagccaggatggtctcgatttcctgacctcgtgatccgcccgcctcagcctcccaaagtgctgggattacaggcgtgagccaccgcacctggcctaattgatatgtttaaatgttaaaattaaatgcaatgatttcctaaaataaacaaatgtgggacaatttattgcactctgttcaaattcccattttgaagtggaattcaaacaaacatgacagtaaagggggacagtgagcacagggacaagagaaaaggagaaagggaagaaatacagagaactagataggaggaagtgtcaaagactgatgggtgtaagccacctttacctctggatattggttttcctttgaattgtggtatgtggtcatattgcttattagttataacatacagctgtcagaagagtttttcaattaaaatttcaaatgtaatattaaaactgtttggattccttcctactgggcactggacactgtctgtggagctgctggaacagcgctgaatagggtcatattttaaaggaactcagcctagtgcagtttctcaaccttagcactattggcctttggggcctgataatccttttttgtgaggggctgtcctgtgcactgtaggatgtttagcagcatccttggcttctactcagtagatgacagtatcaacccccttccccagaagtgacaattaaaaatgtctccagacttttccaaatgtcccctgaggagcaaaattgtctccagttgaaaaccactgggttagtgggagaaacagataagacagaagttctccatacaccatgataatgccatgatgccatagggctggcaggagtgaagggaagagcatctcacaaagactcggggggatgcagggaggaggaaaaattaggaaatgaagtgggctgagttgcagttagcctgtggggaaaatgaaggagaagggataaggaagaagaggaggaaggagggaggaagagtgaggagtaatagggaattatagttgaccttgaacaacttggggtttagggatgccgacccttgcgtagtcaaaaatctgagcttaacttttgactaccctcacactttcctaacagcctactgttgaccagatgctttaccaataacataaacagtttattaacacatattttgtatgttttatgtattatacactgtattcttacaataaggtaagctagagaaaagaaaatgctattaagaaaattgtaaggaagaaaaaatatatttactgttcattaaggggaagtagatcatcataaagctcttcatccttgtcatcttcaagttgaataggctgaaggaggagggggagagagaagagactggccttgctgtcttaggggtggcagggatggtagaggtgcaggaggtggaaggggaggcaggaaaggcaggcacactcggggtagctttcgttgaaagaaatcttcatatgagtggacccatgcagttcaaacctgacttgttcagagtcaactgtacttgttccaggctaagaacagagaataaaaaaaaaatgtatagaggcctgaaacagcatattatattaaaagaactcaaagccggtaaatgctttgctactgaagcataaagtgagaaaggggcatcatgggctctgaaattgcagccacaagtctacagaacacatttttcatagcccaaggtcagtcttctattaccctttgcagtgaggttatcatcatccattttcactcgtcagtgctggggagcccattaaatacttgccactatacttggtcccaacagttaatagactgtagcatcttttatttcttcacctagcctgaaatcagttgagcttttgcagaatcttagatatgtcgtttttttcttcaggtttagaatggggcacttaaaaagatgcatagtacttgaaaatagagaaagaaaatagcatgtagaaatttgtgcctttattctgcccaaacgtctcaaaaaggaaaaaaataattttaagggtaaatattgtcatcaatttatctgagctcttttgacttcctttgagcctgaaaaacaggatcagtgtctttttagtatttaccatagtgcctgatatgtagaaggtgtttgaccaatgtttattagataaatgttcacttttattactagtaatattaaccacattttaatagagactaataatacatgataaacttctcaaggatgcgatctcatttgatcactataacaacccaatgaggtaagcgaggaatagttgttaactctaatacatgttatatcttatccttgacccagtattaccccagtcatgccttcctttccctgcaatgaaagaaaaccgataaacacaaaatgttgtatcccatataagcattcattcttatggtagataagtaaatggaaaagataggtatgcattctcaatttttttaagtcctagaattataaaacagtaaagaagtgagaagagagagaaatcttaagggaccaacctcttgattttacaggtgagaaaactgaggccacatagccatttagtgcagagccaggattataaaccagatgtttggaatcctatgtggtggtggacacgaggatatactaattagcgtcgttaccggaaaattccacatatctctaaggagcagatcaccacacacctgcacagcccaagcctggattgtggaggtttttcttgtagagtttgtctttgatagaaagatacggtccagaaggccggcttcaaggacataagaaagggcatattcaaaacaaatacatgtatgcctattcttttaaaccggtacttaacaatagtatccaggtgtccaaatataatagcttatctgttttattttttccagaaaaggaaacaaggtcttagagaggttacattttgcataggattttgttagccaagtcagcatctgtttgcatcttaaaaatgagtcatacctattccttgtaagtaggacaggagggcagctggaatttcccagctcactccttgtcactgcttcctgcctctgctgctctttgtcctccacagcacgcttcattggctaaaaagtgaaccagatactacattacctcagggcagttgtaagtactgagtcagatgccttaggcttgtgtgatgggaagtttagggcgagaccaatgtcttgctttaacaacagtgtgaataagttaatttcttttgagattttattactcaatattccacccagaaagaaacacagatgacactcagccaatcaaaggccatctgggactgacaaacgcagagcttgttgtagatgacaaggctcagtggatggatcatcactgaaagaaagggaaacagtttgaactgttgtatctctctccttgctcacatgaaaaacaaaaaaatccttggccagttgcggtggctcacgcctgtaatcccagcactttgggaggcccaggcgggcagatcacttgaggtcagaagttctggaccagcctggccaacatggcaaaaccccgtctctactaaaaatacaaaaattagccgggcgtggtggcacacacctgtattcccagctacttgggaggctgaggcatgagaattgcttgaacctgggaggtggaggttgcagtgagccaaggtcgtgccactgcactccagcctggatgacagagtgagactccgtctcaaaaaaaaaaaaaaattccttaaccacagactaagtaagcattattgcacagagtgtcattcgctaatcttgcttgtgcctgaactttgaaagcaccagccccttgctttgggggctgggggcgtggggtgtaagtgtgtgtgtcctctagaagaagacaacactgagaacagaaggagaggatcttggagatttgttaatttcctattgcagttagccttgtctggggctctcactttagcacttaaaataacatactcctttgcacagatgttatttttttctcttcatgtgtacaacttgaattatccaatggccttgctttgaggatattcatcctatcttattgatcctgtcactgtgtaggacaatggagaacacagtaaaaaaccctcaatggatactacttacactaaattaactctatgaattcaaaatttgaagatgctacttaatcatgtaagcctggttctccaaaacttcatctgccatgggaaaaatcaaagcttgtaaaatgattaaacttgtaaaggaattaaactctaggattcactcattttataattggtattttcaccctaagagctttctttttcctctctggtgtttaaaaacaaagtaaaaccagacaaaacaagattaactaaattaaaacccctgtgactttaaaaaatgtagccaagaataatgtgcaagtgtctagttaggccaatagatatccttaacatacgtgagctgggaacacaaatgagcatgaagggcaaggaagagcaccaccccctgcttcttttcctgctcctgttcttgcagagggtcaggcttggagaccacatatggtcagctcaacactcaagtccaccaagcagcccatgaggaactcttccttccagagttgtgcacaccatgcagtgtggtccacctgcagaagcacacaacaggcgctgcctgggccagaggtccattcaggccatggaattggtctcaatgccatttaggcatgaatccagggtcctgggtaccagacgcatggtctaggtagggggtgtcatgtactaggtgagcatggggttccgctgggcatgttcccttgtcttgtaggatgttagctctgaggggcgtggctggaagaaggctagccttgagccctctaaaaggcagggctcagggcaaagctcccagttgctcaggcctgtgggtaatactgcttaaaaatccccttgagaacttctttaaaatgcaaatatctcgattcttttgtagttcaaaagcatgatgattgggtgttcacaggcatgtgtaagacgtgacaccctctgaacctccttatgacccggtacattacctgtctgacctgaaaaaaaaatgcaaatttctggattctacccgcctccccgcactccgacattacgatgtagcagctctgtggtaggatccaggaatctgcctgtgtaatcacaggttgatattctggtgtttcctggttttgctctgctgatttgggggatgtttaccagcaggagagcagcctctttcctctgccctcctcccttgctgccctccccagaccccagtgactcacgctcctcctgctcctcctgttgctggcctctctgttgtggttgccagcgctactttgcagacgctgcctgctccctgcacgccaacacagattctgtttccctgcgaccgctgctgctgttgtttgttccgtccctggtttattgtaggagagctgattgttctgttgccactgctaccaagctgcaaacaccaggctcacggtgcaaggggaaggggcttctcctctgggtgttctgcctctatcgcctaggctctcaggctttgttgccaatggcactgcgagaccctaaactatggccttgtgattcccacatctccatttagttctttcttttgttctctaagatctgagaaggagcccatgtctttcagtgttcctgttttcttgcgatacttcccccctccccgactccagaatttagggcaaccttctgctgtggtctgaatgtttatttctctccaccccgccaaacttatatgttgaaatcttaacccctaaggtggtggtattagaaactgaagcctctgggaggtaattaagttataaggacaaagccctcatgaatgggattactgttcttataaaaaaaaggccccagagagctagctagctccttccaccatgtgaggacacaacgtgaaggtgctgtctatgaggaagggtccctcaccagacaccaatcatctggcacattgatcttgaacttcctatcctccagaactgtaaacaaataaatttctcttgcttataaaccataagttcatgattttttttttttttttgagacggagtttcgctcttgttgcccaggctggagtgcaatggtgtgatctcggctcacaacaaactccgcctcccgggttcaagcgattctcctgcctcagcttcccaagtagctgggattataggcatgcgccaccatgcctggcgaattttgtatttttggtagagacagggtttctccatgttggtcaggctggtctcgaactcctgacctcaggtgatccacccgcctcggcctcccaaagtgctagggttacagatgtgagccactgcacctggccaagttcatgatttttgtaattagcatccaaaatggactaaaacccccatcctcctgaaggttctgaatctgaggacccaagacttggctctcagccttaatgtcctgctcccactattttcagggggcccaatataaatttcctgagtttttgaggtggttgggcttgcagactgacctttagtatgccctttgttacatttacaaaatagattgcttacagggttagacaaatacagttgaccctctgtatccctgccttccatatccatgggtcaaaattatttggaaaaaaaaatgtgtctgtattgaacatgtatagattttttttttgtatatttcctaaactatatcgtataataactacttacagagcattcatattgtattaggcattataagtagtgtagttatgatttaaagtatgtgagagaatgtgcacaggttatacagaaatactacaccatttttttttttttaatcagggactgaagcatcttttcagctatgactttggtatccggtggcgggtggggcggtgggtgggtcctggaaccattcctccatgaataccaagggataactctaattgctaaatcgtttcctatttttgtgaactggtaaaggactgcatgagaaaggccaaaaattaaagaataatatgcttattcaagcccggtgtggtggcgggcacttgtagtcctagctacttggaaggccgagatgggcccaggagtttgaggctatagagggctatggttgcacctgtgaatagtcactgcacactagctcgggcaacatagctagaccctgtctctaaaaaagaaaaattctgctgtaataaacctgcacgcataaaatgatgtctatgtgtctatatagtgtgtatatacatatgtgtttaggaaatgtgtatatatgtgtgtgtgtttgtgtgtgtggatactgtattagttaagacaaaaaaatctggcttcatatgttataaaataatgtctggagctatccactcaagtgtgctttcttgtttctctgtttttttttttttcctatttcattcagtggttttcactgcctttgggaaaaagtgacacagcaaaacacttagaagaatcaaatgtttatcctttgagaatgtggtctgtacataagagaaaacatttagaatcaaattatgagactaaaccagtttccctcacctgcagctagataaaaatttctaagaggaaggagagaatcaggaaagattgaagacttgactccctgataagggttctgcccgagttctgagaatggagaataaaagacaccctccccctctctaatagattttgtcagtgaaggtcagagaggcccacgaaatcaggtctggggagcaaggtaaaacccagaatttctacatgatcatgttaaagagggaataaaggaatatcattatagtgtatctgggcaggtgggcatgagacagcctgattgagttcctgaaatcccaggtcggtgtgggagcagcagaatattttaggtggctgagagctccatagtttctttctttctttctttctttgagatggagtctcactctgttgcccaggctggagtgtagtgacgcgatctctactcactgcaacctgtctccctggttcaagtaattatgtctcagcttcctgagtagctgggattacagatgtgtgccaccacacctggctaatttttttttatttttagtagagatgggattttatcatgttgcccaggctggtctcaaactcctgacctcaagtgatccacctgcctcagcctcacaaagtgctgggattacaggtgtgagccaccagcagtcccagctactcaggaggctgaggcagaagaatcgcttgaacccgggaggtggaggttgcagtggaccgagattgtgccactgcactccagcctggtgacagagcaagactccatcttaaaaaaaaaaaaaccttctcaaggtattttctgtgcttcttgttttctcttttgtatttttcatctttatatctttgtgtttcattctggataacttttagtgacctgtctcctagttcactaattctctttttagctatgtctagtattataatttgtttattgaattattaagtttaggtatcaaattttcagctttaggatatctaatttgccacttgttttctgccatgattttttttttttttttgaggtggagtcttactctgtcacccaggctggagtgcactggtgtgatcttgactcactgcaagatctgcatcccgagttcacatcattctcctgcctcagcctctcaagtagctgggactacaggcgcctgccaccacgcccagctaattattattattattattattatttgtatttttagtagagacagggtttcaccatgttagccaggatggtctccatctcctgaccccatgatccacccaccttggccttccaaagtgctgggattactggcatgagccactgcacctggcttctgccataatttttaaccttgagttttacctacttaaacatagcaaacacagttgtttatatatttatctaataattccagtatcaggagcctctggagtctacttttgtctactttcattgttttttgttttttaaatttacattaacagtgtctagtctgtatttatgcctggttacttttgattgtgtgctagacattgtttttggcaaataattttttaaacacaatatgtacaaatcatatgaagcctagactggtgttttgttcaccaaaaaagattttaaattacttcagttacgttcctagggacactattaactcaggatgatgttaattgaagtttcagatttgatattttccaggtcaactggaccaactgtccctgctatatgatttatttcctaaagcaatatcaagttcagctctgcacctctcttatatactatggagctctcagtcacataaaatattctgctgctctcacactgccctgtagttcataagaggaacagtttactgttaatccgtattactcttacatctagggtgtagctctttgagctaccagtccaaagtgaagaataatttactgaattcctactttgtctggctctaggcactgattttttttaccctcttggccacctatcttcaattggaaaatgccctcaattcaaaaatgctccaagtgccaagctttcctatctgaattcccattttttcctgtatctggctggcaattcattagaatcctgctagccctctgatgcttctaagattttcatcttttatttttatttatttattcgagatggagtcttgctctgctgcccaggctggagtgcagtggtgtgatcttggctcactgcaacctccatctcctagggttaagtgattctcctgcctcagcctcccaagcagctgggactacaggcatccaccagcatgcccggctaattttgtatttttagtagagatggagtttcaccatgttggccaggctgatcttgaactcctaacctcaggttatctgcctgccttggccttccaaagtgttgggtttataggcattagccaccatacccagcctgaagttttgattaaaaatgctttactgggctgggcatggcagctcacgcctgtaatcccagcactttgggaggttgaggcgggcagatcacttgaggtcaggagttcgagaccagcctgaccaacatggtgaaaccccatctctactaaaaatacaaaaattagccaggtatggtggtgcatgcctgcaatcccagctactcaggaggctgaggcaggagaatcgcttgaatctgggaggcagaggttgcagtgagccgagatcgtgccactgtactccagcctggacaacaagagcgagactccgtctcaaaaaaaaaaaaaaaaaaaaaaaaaaaaaaaaaaaaaaaaaaaaaactttaccggaattaaagcccagtcatcttgaagccatgatcatgacgctgtggaagaaccggtgaggtaggatgagacatattctcagatgctatgctgatttggggctgtgatgattttggaccatagactatgatgaggcttcaaaaagagtgcaatagtgtattttaatttctttggttagattcaaattaatcttcagaaagacaaaatgcagatgtagtcttgttagagcttgctgatgagactaaattttccaagtgtttgaggaatgcctaacaggggaaaggcaaagcaaactatttttaatgaccttatggctctgaattgctaaaagggagtcagtccaccaggctcaggctacttggagtagaggatcctgtttcagtgacaaactggctcatcccttaatctgccataaaatgatggcttagcatacatgtaggagctggggctaagggagaaggaggtgctgtgttttgcagaagaagctacattctgtagtaaggcctgactcttccctggccttggaggggaaatacttgtgagacagtggccaggatcagctgaagtgccctctcttcttgctttgcctatgggacactgagcccctttttgtggaatatattcatccagagaaccctcacaccttataatgcataaagtgataaaggcttggagatctggagaaacccaaggtgcgatccctggctctagaagaaactctgggcagccagcatgatttacttttctctgctccaaagactggaggataaattaaaggaaaagagggtatgacccagcaatccactggtgcgagttgttgctttaagcaaagactactgcttctcttcctgattttcccctgaccatactctcccagaggtgtctcccagcaaccaccagagttgtggttaagtacacctagccaatccaataaatctaaaggagatgcagtccacacaaccttgcatgacttgtcatgtgagttactgttctggagagacaaactcaggctggaaacttatttgagatagcttatgaaaacaaagataatttatgataaggatacaggcactctcatacaatctaaggtagaaaaacagctaagcatcagaacaaactggaccaaagacttaaacacttctgctcctttgtgtaattggtttcatgcgtttctctctctcccttcctctctctcttttctctctgtggactaggtttttctacttttcatatacaaattttaaaaatacaatttctggccaggtgcagtgactcacgcttgtaatcccagcactttgggaggccgagggaggtggatcacttgaggccaggactttaagaccagcctggccatcatggtgaaactccatctctattgcaaatacaaaaattagccgggtgtgatggtgcacgcctgtaatctcagctacttgggaggctgaggcaggagaatcgcttaaacctgggaggcagaggttgcagtgagctgagattgtgtcactgcactccagcctgggtaacagagtgagaatctgtctcgaaataaatgaataaataagtaaaataaacaataaaaataaataaagacaattttaaaaatttcccaacattaagtgtcagcaatttggagagggacagctgtctcttgttctctctcttctccaattctcaattcctaggtctgatgctttccctggctcaactgactatggttgtggggtagggccatgaaacagaaatatcacattaggatccaacctttaattatgtagatggacagcagtttacagaaaaagtggtggggaggtggagggaggtgctgaacagacattctaaaagggctccaccaaagaaagctatttgttatatttatgaacattctggaaaattctttcaattgtgttcatgaataaattatgattggttaaaagctaacacacatgtagattatataacttctaaaatttgtatttggtatctgaatctatatattattttggcatgtatagaaaaatcccagatatttcaaaggctatcattagaaaaacgttaatgaaaaggttaatggaattctatatatttagttcctgtgagaatgtccagtttaactttcttaatcaactgatgaagaaacagaactgaaatcacaagattataaagatattttaacgatgcatttaggttttcattctaaatgctgaaaaaaggtatccctgcaaatactggttaagaaattaagaagtccaaaacccaataatgtagttggcagcctgttataaagatttagagtattcaaagataaaggcaaataaaaagactactttttataccagagtagaaacagtttattttcatgatcactactcttacttcaaatatatctattatctaagttgatgcttgcaaaaagtcctgattcttacacaaaggcagtcgattcatggatctcttagagagagagaaaaaaaaaaagctagttgggtgtgttacagttatatgaatcatgtaggatgctgcttaacgctatatttatcatggatgaaggcatgttttcaggggaaactatgagtctacctaaagttacccagttcacctctgttccaagggactcatcttttcagcattttgtttagcatgttacaaagtaccccgatgtcttctaaactattaggattgcaggaggaaactctcccagagctgctagaagtcatccttgaaagtttggatttctcccgaaaacttgtatttctatcattgttttaactatcttcttgaatcctcttgatcctgacctacatgtcctcttcccttgattgcatttaaatttagctgcatataaccttgctcttttccttctaatccaacctataaaccatatcaggggaggatatgtgatttgtcaattttgttgcctcacttcctcctcaagaactttcagtggctccattttacctctgagattaaattgcagccactcatcctgagttttggtgttccacaatctgacatatctagtcagctttgtgttctagtgtgtttgtgttgctataaaggaagactgagactagatagtttaataagaaaagaggttgatttggctcacaattctgcttgctggaagattgggcatttggtaaaagccttaggctgcttctattcatggcagaagagtaagcggagccttcatgtgtggaaatcatagggcaagggaggcagcaagggaggtgtggagaggtgccaggctctttttaacaaccacttctcatgggaactaatacagtgagaactcactgactctttctacagggagggcattaatttattcgtgaatgattctcccccatgaccaaaatacctctcattaggccccacctccaacattgggataaaatttcaacatgaggtttgaaggggggacaaacatccaaactatagcattctgctttggccccctaaaacttatgtccttctcacattcaaatacaatcatttcttcctaatagtccctaaaagtcttaacttgttccagcataaactcaaaagtccaaagtccaaagtatcacctgcgactcaaggcaacttctttacagctgtgagcttgcaaaaataaaaaatgaattatattcttccatgatacaatggttgtacaggcattgagtaaacattcccatttccctaagggagaaactggccaaaagaaagtggtaacaggtcccatccaagtctgaaacccagtgcggcagacattcttttttttgaggcagagtctcgctccgtcacccaggctggagtgcagtggtgcgatctcggctcactgcaagctctgcctcctgggatcacgccattctcctgcctcagcctcctgagtagctgggactacaggcagctgccaccatgcctggctaattttttgtatttttagtagagacggggtttcactgtgttagccaggatggtcttgatctcctgacctcgtgatccgcctgcctcagcctcccaaagtgctgggattacagacgtgagccaccgcgcctggccagacattaattcttaaaactccaaaataatttcctttgattccatataccacatcctgggcatagtagtgtgaggggtgggtcctaaggccttaggcagccccactctttggctttgctgggtgcagcccacgtgactgctctcacagattgaagcccaatgcctgtgcctttttcaggctgcagttgtatgttgctggtggctctataattctggggtctggagggtggtagccctgctcccacacctccaatagataatgcccaagtagaggctgtgtgtggttgatctgaccctatggcagacttctgcctgccttcccaggtgttccaataaatcctctgaaatctaggtggaagctgccaagcctccaacattcttgcattatgggcacctgcagatttcacaccatgaagccaccaaggcttaccacttacacccacctaagcagtggctcaaacagtacctggggccattggagccatggatggagccagagtggccaggatgcagacagcagcatcctgaggcagcacagggcagtggtaccccaggcttgtcctgcaaaattattttgtcctcctaggcctctaggcttgtgatgggaggagcagcctcaaaggtttctgaaatgcctttggggccttttttttccaaagtcttggctattagaacctagctcccacttagtcatgctaatatctctctagcaagtgtttggctgcatccttgaattcctctcctgaaaacactctttcttcatctaccacagggccaggctgtaaatcttccaaatttttatgctttacttggtttttagttacaatttacaactttaggtcactcatttgctgccatatctagtttacaatcatatttacaattaaaagcagtgtaaaccaaaaagtatctgagacaggtctcaatcaatgtaagggtttattttgcgatggttaaggaccatggcccatgacacagcctcaggaagtcctgagaacatgtgcccaaggtagttttgtgtagcttggttttatacattttagggagacagaagttacagacaaaaacataaatcaatacatgcaaggtatacattggtttggcccagaaaggcaagacatctacaagtgggggcttccaggtcataggtatattcaaaaatttcctgattggcaatggttgaatgagttaagctctgcctgaacagttgaagtcagcttgagttaagataaagaggttggctgggcactgtggctcatgcctgtaatcctagcacttttaggaggctgaggtggtcagattgccacctgggcaatctgtttgagatcagcctgggcaacatgatgagaccctgtctttccaaaaaataaaaaaattagatgggcatggtggagcacacctgtagtccttgctactcgagagactggggcaggaggattacttgagcccaggaggcagaggttgcagtgagctgagattgcaccattgcattccagcctgggtgacagagccagaccctgtctgaaaaaaaaaaaaaaaaaagtgaaagtcaaggttcttgtcatgtggatgaagcctccaggtagcaggcttcagagtgaatagatgatgaatgtctcttattagaacttaaaaggtgtcagactctctggaaaaaacttggtaagggagagattctctacagaacactaacttcctccacaagagacaacattgcagggccttttcaaaatgtcaaataaatatattttgggataaaatacttgtattgtattgtattgtattgtattgtattgtattgtattgtattgtatcgtatttttgagacagagccttgctctgtcatccaggctggagtgcagtggcacgatctcggctcactgtaacctccgtctccccagctcaagcgattctcctgcatcagcctcctatgtagctgggattacaggtgtccaccaccatgcctggctaatttttttgtatttttagtagagatggggtttcaccatgttggccaggctggtcttgaactcttgacctcaagtgatctgcctgccttggcctcccaaagtgctgggattactgggattacaggcatgagccaccacacctggacaataaaatacttttatttcctttaggtcttgctatgtcatgtgatgctatatcagagtcgggttcaaatttggtatcttattgctacaaagagtctgtcttgtcagtcatatgatctctgttttaatgttaatgctggtcatttgtgtctaaactccaaagggggagggtgtaataaggcatgttgggtaccctctcatcttgctatggcatgagctagtttttcaggtttctttgggatctccttgaccaaggggtccattcagttgattgggggagtttgaattttaattttgatttccagcagccacgccacttcttgaatgctgtgttgcttagaaatttcttctgctgctgggcatggtgactcatgcctgtgagaggcaggcactttggaaggctgaggtgggcagatcaattgggctcaggagtttgagaccagcctgggcaacatggcaaaaccccatctctacaaaaaatacaaaaaaaaaacaacaacaaaaaaacaaatcagccaggtgtggtggcatgtgcttgtagtcccagttactcgggaggctgaggtgggagaatgacctcagcctaggagatggaggtttcaatgatcctagatcgtgccactgcattccagcctgagtgacagagcaagatcctgtctcaaaaacaaaacaaaacaaaacaaaatttccgccagatatcctaggtcatcactcttaactgcagccttccacaaatccatagggcatggacacaacacagccaagtttttttttctaaagcataacatggaaccctttgctctagttcccagtaagtttctcatttccttctgagacctgctcagccttgcctttactatctatatttctatcagcattttggtcaaaaccacttaactaatctctaagaagttccaaactttccctcatctgcctgtcttcttctgagccctccaggttcttccaacctctgtccaatgccctgttccaaagttgcttccacattttcagttgtctttacagcaacatttcactacttggtaccagtattctgactttgtccattttgcattgctttaaacgaataccggaggatgggtcatttacaaagaaaggggtttatttggctcacagttctgcaagcctgtacaagaagcatggtgccaggatttgcttttggtgaaggcaaggaagcttccattcatggcagaaagtgaaggggagcctccatgtgcagagatcacatggcgagagaggaagagcgtgagaggaggggaaggtaccatggtctttttaacagaggtacaggcttttgagggaactaacagattgagaactcgctcactcccacccctgccagggaggtcattaatctattcatgagggatccacccacataacacacacatctcactaggccccacctccaacattgggatcaaatttcaacatgaagtttgggagggcgaacatccaaagtacagcaccttgtttcttgttgttttctaatatttgttctttatcccaggaaatggggggtaggaaggtgagttcttggtgtactctaagcagtcatgctcagcctgtactatcaaattttattccatttattcttctgttgaggcttgcatgacttccctaaggtacaatggcagagatagccacatgggtagtaaaatcaggggcagacagaccagctttctgccaggaatttacctcagggaaattcctcatctttgactttcctcgttctgacttttttttcttttaattccacctcctctccaaacctggcactattcctttccgatctttatccttgtccttactgttttgaagttggctcttatgcctgtttgtctttgcaatctgtctctgcgtcgcgtgttggtagtcatttatttttgtccctagtcatgattcccagaaccttgctgtggtcattttgatgccccaccctttgactattacaaaccaggagagctcatgcaagtggccacatgctgtagtggttaagagcacaggccccgtagctgaacttgaaactcagcatgacaacatgctggctgtgtgactaaggcaaattaaatgaccactctgtgtccttattttcttatacataaaatggagctacaatagtacctcctcatagggatgttgtgaagcttcagtgagttaatacagatataatgattagttatctgcctccattaaatccaatcatcaatactacccagctttattaaaacttctgacttttgttttggatgtggccaggtcctgaactgaattgttttttccaggtcaaatttaaatctaccctcctttcctttttctcaatgccaaattgttcttcagtttccatctctagccccataatctttgatttctcttgcccacatggatggttaccttttctgaaatgtcatagctcttacagtgctagccacctattttgatgccaaatctttacaccaaccagtgttatcacttaatcaattcttacatctatgtcttaacttctccaaccaaacttaagacttgttggtgccaagaatcaaatctcatacttttgagttattcaaaccatacagaacagtagatactgaataagtatttgtctgaatgaattgtttgaataacttaaagagcctagaagcggctgggtgcgatggctcatgcctataatccgagcactttgggaggctgaggcgggccgatcacctgaggtcaggagttcgagaccagcctgacaaatatgatgaaaccccgtctgtactaaaaatacaaaaattagccgggcatggtggcatgcacctgtaatcccagctactcaggaggctgagacaggagaatctcttgaacccaggaggtggaggttgcagtgagccaagatcacaccattgcactccagcctgggcaataaaagcaaaactccatctcaaaaaaaaaaaaagagcctagaagctttccagggtggtcttgggggtattggctttagaagaggaagcttgatagatgaaaatttccagatcaacggcattttatgtacttctcagaaacaaggtatgactagactgaaagatctgaagtcaggaagaaacttcttggtatcagtctgtgcccttaggaagaagtgaggtcataagctctattagcacacatagctgaaaaactgaaagaggatgtaagagaaaggattgttaaaaaacaaaaacaaaaaaacacaaaaaaccaaaaataaaaaatctgggtgaggtatttgcaatactagagccaaagaatttgacctaagaggccgggcgtggtggttcacatctgtaatcccagtactttgggaggccgaggtgggtggatcacttgaggccagaagtttgaaactaacctggccaacttgttgaaaccccatgtctactaaatacacacaaaaaagggcccggcgcggtggctcgtgcctgtaattccagtactttgggaggctgaggtgggaggatcacctgaggtcaggagatggagaccatcctggctaacatggtgaaaccccgtctctgctaaaaatacacaaattagccgggtgtggtggcatgtgcctgaagtcccagctacttggagggtgaggcaggagaatcacttcaacctaggaggtggaggttgcagtgagctgaggtagcgccactgcactccagcctgggcgacagagcaagactctgtctcaaaataaacaattaactgggtgtggtggcacacacctgtaatctcagctgctcctgagcctgaggtgggagaatcacttgaacccgggaggcagaggttgcagtgagctgacattgtgccactgcgctccagcctaggggggagaaaaagaaaaaaaagaattctgatccaggcactgactcattgagcaagtcatctttactgttcaggcctcagctttcttcctttgtttttttttgagacagagtctcattctattgcccaggctggagtgcaatggcatgatttcagctcactgcaacctctgccgcccgggttcaagcaattcttctgcctcagcctcccgagtaggtgggattacaggtgcctgccaccgcgcccagctaatttttgtacttttagtagagatgggggtttcactatcttggccaggctggtctcgaactcctgacctcatgatccacccaccttggcctcccaaagtgctgggattacagatatgagccaccgcacccagctaggcctcagttttctaatgtgtaaaatgaaaatatgcactagaccttcacttgtttttttctatgtgataattttttttaaaaaaagaaggtgtcatgttacattttatctttatgtttacatttcatcttgtaaggttgcctttgagccttgacacagtgatttttctcattcaactagtttctctcccatctcaactagtgacctcaccatccactaattgtttaagccagaaattgggaacttttccttggttcctcttccttgtttacttcttccatctaccccatgagcaaatcctatctgttcttccttaaatttagttcccagatctatctcctgcatctcaggtctatgtacttcttcccatctcccctgctactagtctgtccagagctacaaccacttcccttatagattattggaataaccttcttattggtcttcatattttcactctgactcccctctgatcaattttctgcaatgcagccagaattatcttttaaaaatgtaagtttgagccaggcacagtggctcacgcctgtaatcccagcactttgggaggccaaggtgggaggatcacctgaggtcaggagtttgagatcagcctggccaacatggtgaaactctgtctctactaaaaatacaaaaattagctgggcatggtggtgggtgcctgtaatcccagctacttgggaggctgaggcagaactgcttgaacctgggaggccatatatatataaagtttgatcacaccactgtcctgcttaatctttttttattttttaacttttaaattttttaagagaagggtctctctgtgttgcccagactggtctctaattcgtgggctcaagagatcctctcatcttagcctcccaagtagctgggaatacaggcatgtgccaccacacccagtgactttccttcctaaaatgcttcaatagtttctttttctttttctttctttctttttttttttttttttgagatggagtctcgttctttcacccaggctggagtgcagtggcgtgatcttggctcactgcaacctctgcctcccgggttaaagtgattcttctgcctcagtcttccaagtagctgggactacagcatgtgccaccacacctcaataattttttgtatttttagtagaaatgggtttcaccatgttggtcaggctggtctcgaacagctgagcttgtgatccacccgcctcggcctcccaaagtgctgggattacaggtgtgagccactgcacccagccacttcaatagtttctttttgtgcttaacataaagtttaaattcatgtccagagcctataaggtgtcatatgaccaggcccctcaaggtatatccacttcactcaagccatgtttgtctcatcttaattcttcaaacaccccacattctttcctaactcaaggtctttgagcttgctgcttcttccaggtggactgatcttagcccttccctttgttgttgattttttaacttttttttttttttttttgtgagaaagtcttgctcttgttttccaggctggagtgcagtggtgcaatctcggctcactgcaacctccacctcctgggttcaagtgagtctcctgactcagcgtcctgagtaactgggattacaggcacctgccaccacacccggctaatttttgtatttttagtagaaatggggttttgccgtgttggccaggctgatcttgaactcctgacctcaggtgatcctcccacctcggcctcccaaagtgctgggattacaggcatgagccagcgctcccagcctttttaccttttttttttttaatttcaataggtttttggggaacaggtagtttttggttacgtgaaaagttctttagttgtgatttctgagattttagcacacccatcacctgagcagcgtacactctacccaatgtgtagctttttatccttcacccccccaagtctttccctgagttcccaaagttcattgtatcattcttatgcctttgcattctcgtagcttagctcccacttacgagtgagaacatacaatatttggttttccattcctgagtctccaattccacccaggttgctgtgaatgccattaatatgttcctttttatggctgagtagtatttcatgatatatatatacacacacacacacacacacacacatatatacacacacacatttatatgtgtatatatacacatatatatatatgtcacatttctttatccactcattgattgatgggcatttgtagccctgccctttgaatggctgacttcttcttatgcttcagaattaatactttgtaattacattaatatgttttttttaaaaaaaaaccttttacatatatattggtctgtcacaataatgtataacaatattatagtttctgttttaatgacttaactttggcaaactggtcaatgatttcattaaaactgatctttttaaaaataatcagcttcaatagacagtttaaccagatttgtcaactttttgtttttggcacagtctcactctgttgcccaggatggagtgcagtggtgccatcttggctcactgcaacctctgcctcctgggttcaagtgattctcatgcctcagcctcccgagtagctgggattagaggcacctgccaccatgcccagctaagttttgaatttttagtagagatagggtttcaccatgttcgccaggctggtctcgaatgcctgacctcaagtgatctggctccctcgaactcccagagtgctgggattacaggcgtgagccaccacacccggtctccataaaaaaatcttaaacaaaaggatatggttggtgaaatacaaatcctattgcgcagtaattttcacaaattttaaaattgacaataccttcgcttctttcagatcaattatagtggctttcaaatgtcatcgctcaaaaaagttcaaatgtcatcgctcaaaaaaaaaacaaaccttcactagaaaattaatcataaattgatggtacagactgggtgcagtggctcacaactgtaatcccaccactttgggaggccgaggtggatggatcacctgaggtcaggagttcaagaccagcatggccaacatggtgacaccccagctctactaaaaaaaaaaaaaaatgaaaaaattagcccggcgtggtggtgcatgtctgtaatcccagctacttgagaggctgagacaggagaatcgcttgaatgcagaaggcggaggttgcagtgagtcgagatcataacactgtaatccagcctgggcaacagagggagactcctcaaaaaatataaaaataaataaattgatgttacatttggaaaaactgctgaaattttcttcttctgcaaaaagttagaaaaaaccactgaatgattgaaaacattgacattatttaattctttgctttagagcaagtactcagttcttgattgaagtgattgagggattcaaacattgtccttttgttttcttccggtaacgtcagaccagcatattttgttattgctgctggctgttttcttcaaaatttgctttgaaaaagatgtaaatggccatttccttatacttgtgattaaatatttgttggcctttccaccagttctctgcactgatcttcaagaaaaaattttaaaacctgcacacaaaattttaaagactgaacacagaattttaaagcatgcacatttttcaaagctgtttctatctctttggaagtttgtgtctgattaagttcatctaagacttcactccaggaaaaaagttaacccagaaaagataaatagcctcagcagagagaaaaatctactgattttcttgtgtctacattttgttttagatagcataatacttcaaaagttggtactcatttcttaaactttactgtgtgcatagcttcaaaatgaatactttgttgtgtgtgggaaagccttttcattgttatacttacaatcttcagcatggtccatccgtgaatcttttttaaaattgataaaaaggccaggcgcgatggctcatgcccgtaatcccagcaccttgggaggccaaggcaagtggatcacctgaggtcaggagtttgagaccagcctggccaacatggtgaaacctcgtctctactgaaaatacaaaaatcagctgggtgcgttggcgtgcgcctgtaatcccagctactcaggaggatgaggcaggagagtggtttaaacctgggaggcggaggttgcagtgagccgagattgtgtcactgcactccagcctgggcaacagagcgagactccttctcaaaaaaaaaaaaaaaaatggttaaaaagatgaaataaaaattttccaagttcccctcaacccccctaaaaaaaaatcatacatgaagaaacatttccaaaacagtggagtttggagattgatttgcacaagcacaaatgaggatttaggataaatttctttgacttttacctgaacactacagtcagtcttggccatagtttcagcattgccatgtccttggtcatgatagaggttcatgtccagcatatcacaattcagtcatatggtgactattatgtgagttcaggagtgtttatcctagaaatagaaagacacccaggaatgactcctttctttcaaatttgctgttctcaaaatgaacatacttaaggactttacatttgatcagggtataaaccactgggaagactaagtgctcagaaaaagaaccaaagacttggagataggaacagagcctgaaatgaacagaaactattctataccccccatgaacctagaaacaaatgtgtatagctaagcgtattagtccactcgggatgctttaacagaatatcaataaactggaatgcttcacagtaaacatttatttctcacagttctggaggctgggaagtccaagatctggtatctgctgaggttcctcttactggtttgcagatggccgtcttcttgttctatcctcacatggcagagagcagagaacagaccatctcttgtgtctgttcttagaagaacattaatcctatttatgagcactctaccttcgcaaccaaaaggcttcatctccaaataccatcacttggagatttagccttcaacacaggaattttgggggtacacaaacattcaatccatagcactgagtctgtatgtgttgggaactgattgataaattggaattcttcaaattaacttacatgtagaatacagtatttattaaaggataagtaaaaagaaatgtgttaatttatagtgtatttattattattaaaagtctatagggctgggcacagtggctcatgcctgtaatcccagcactttgggaggccaaggtggggtggatcacgaggccaggagtttcaagatcagcctggccaagatggtaaaattccatctctactaaaaatacaaaaattaattgggcatggtcaggcgcacgcctgtaatcccagctacttgggaggctgaggcaggagaactgcttcaatgaacccgggaggttcattcaagatcacgccactgcacttcagcctgggtgacagagtgagactctgtcttaaaaaaaaaaaaaaaaaagtctacagtaactgcaattgtttagaatttaagccaacaagatatgttttcttttccgggagttgtattttttatcactgattgtctacaattgacagtgcatgtcaaaaagcagacttgtcgtgctgcagtggctcacgcctgtaatcccagaactttgagagggcgaggcaggaggattgcttgagcccaggagttggagaccaacctgggcaacatagtgagatcccatctctaaaaaaataaaaataaaaccactcatttttgtcaattttattactgcttttaatttttctaaagacgatgtgctgctccagctctgggtacacacatgcccacgagagcaagctcatgagagaagaaactacatcccctctatccacctatatttctaacgccttgcacagtagctggcacatagtggacatgaaataaatatttgtggaataaataagtgaagaagaattttagaatactttataagaaacaataaatcttcagagatcaacatttcaaattagtaactttatttacaaacctctcttctgggttttattatttactacaagtgcttgcaagacctgttattgtacactcatgtattcctatcaaaggtaatcatcagacattatatttcattaaataatttaatggtgctttctgttctttattcattaatttttttgtgtgtgtgtgagaatggagtttcactatgttgcccaggctggccttgaactccagggttcaagtggatcctcctgccttggcctcccaaagtgctgggattacaggcatgaaccaccatgtccaacaatgttttctgctctttagtaagtctagccatattaaattttatgtgttttttttttcttttttgagactgagtctcactctgtcacccaggctggagtgcattggcgcgatctccactcagtgcaacctccgcctcccagtttcaagcaattctcttacttcagcctcctgagtagctaggattacaggcacgtaccaccacatctggctattttttttttttttttttttgagacgaagtctcactctgttgcccgagctggattgcagtggcatgatcttggctcactgcaacctccacctcctgggttcaagtgattctcctgcctcagcctcctgagtagctgggactacaggcatgtgccaccatgcccggctgatttttgtatattttttaacagagatggggtttcattatgttggccaggttggtctcgaactcctgacctcgtgatccacccaccttggcctcccgaagtgctgggattacagatgtgagccaccgagcccggcctaatttttgtgtttttggtggagatggggttttaccatgttggccaggctggtctcgagctccggacctcaggccatccacctacctcggcttcccaaagtgctaggattacaggcgtgagccactgtgcccagctcatattacattttaaatggaggtagaatatcaacctgaattcactaagagaatgcaggacaaattgccctgatatcctgacacaaaggtgaagcaggacttttttgtaatttgaggatttaaaagcatggttgctccaggccaggcgtggtggctcctgcctgtaatcccagcactttgggaagccgaggcaggcggatcatttgaggtcaggagttggagaccagcctggccaaaatggtgaaaccctgtctctactaaaaatacaaaaattagctgggcgtggtcaggcgcctgtaatcccagctacttgggaggctgaggcaggagaattgcttcaaggaacccaggaagcagaggttgcagagcccatatcgtgccactgcactctagcctaggtgacagagcgagaccagcctggccaacatggtaaaaccccgtttctactaaaaatacaaaaaattagcagggcaagctggcgggcgcctgtaatcccagctacacgggaggctgaggcaggagaatggcgtgaacccaggaggcggagcttgcagtgagctgagatggcgccactgcactccagcctgggcgacagagggagactccatctcaaaaaaaaaaaaaaaaaaaaaagtatggttgttccagtcctgggaaattgaaatagggggtaaaaaggctggtgggtgtggtaggcagaataattacttcttccctctcccaagatgttcaggtcctattccccatcctattccctggaacctatagctagattgccttatggggcaaaaggaatttttcaagtgtgactaaatttagaatcatgagttagagagattatcctggattatctgtgtgggtttaatgtaatcacaggggtccctagaaagaaaagagggaagcagaaaagccaaaggagatggaatgatgggagttgagatcagtcagatttacagatgcaatattgtttcctataaattctgtggtgaaagaaatgctatattgttgctggctttgaagatggaggaaggggctgagagtgaaggaatgcaagtgaccttaaattggaaaagacaagaaaataattggccctgtagaggttataaaagaagggtggtccttctgacacactgattttagtccgatgagattgattttgaacttctgacttccaaaaactgtaagacaatacattagtgttattgtaaaccactacatttttggtaatttgttacagcaataggaaacttatatagtgggccctgggatccatctgccctagccgtttatctaaaacaaaagatcttatagggaaagcaaacaaacaaacaaaaaatacagaaacaaagcaaaacaaagcacccctatgctctgagcttgggcctggtaagggcactatgagcccatgatttagcatgttgctgggaaatctccttccccctgttgagttgccagaatcgtggaagcagatggtgtgggggattcaggctcctccactgcttttctcagccagacctttgaggagagcttggctgaagtcttccaagctttatccccttgtagccattgttttgagccatctcaaacattaagtagctcttgagggttgaattgagtccttcctaaagacagactaaagtcctagtctccaggacctgtaaatgttcccttatttgtaattaggatgtttacagatgtaatcaaattaaaatgaggtcataccggactagggtgggctctgatccaatatggccggcatcctcataagaagaggagaagagacatagacacatagggaaaagaccgtgtgatgatggcagagattagagtgatgtgtttacaagccaaggaatgtcaaatattgccggcaatatcagaaactaagaaaaaggcatggcacagattgtctctgagagcctctcagagagtatggccctgctgacaccttagtttcagaggtctagcatccagaactctgagagaacagatttgtgttgttttaagacacccaccatgtggtaatttattacagtagcccttaaactaacacagtgaccttgtgtcttctgccagagggatttgatcacactggtgaggaagggtcctggtccataataacccaaatttctgccagggaagaggagattgaaaggtcccagtgatcttggcctatttacttgggagctcttccacagaacaaatgaactcctgaagatgagctgctacaaggattctgtgctttggacagaattgcacttgtctcttccccctgctgtcactccctgactaggaaaggtccaagctgtgaaggaatcccccccagaagagacttgtaagcattaaagacctgtggaaaactaagagggagggtggatagaggagtctggagaccgactaaccttctgagctgcttattgcctgaagtgggggtggagtgggctgcaaacactgttgtatttgggggacacatcacagatgcttatttgcaccttggactttgtcaggacactctggttacagcacaactttgtgaacatggatcacaagatacttggaaaagcagtgtttgcattaatcagattaggattagctaaaattttaattaaagaaccagagagtacttcagaggcaaggagatgatagttacctgggattacttgctatttgtgaaaccaaccagctgaccacttgtgttgtttgtcccaaggtataataataactagatgtttgcatattgtgattgtttctgttcggatttaatggctgatctatttatcatattaaaagagggatcaagttcaaagatttcaatgctctttatcttctttctatatatgatatttatttttaaatgtccatattaaatatacatatatacacacgattctcagaattacgaagaatgtgctgtgtagcattcaattatatatataattttttttttgagatggagtttccctcttgttgcccaggctggagtgcaacggcatgatctcgggtcacagcaacctctgcctcccaggttcaagtgattctcctacctcagcctcctgagtagctgggattacaggcatgtgccaccatgctgggctaattttgtatttttagtagagacggggtttctccatgttggtcaggctggtctcgaactcccaacctcaggtgatccaccggcctctgcttcacaaagtgctgggattataggcgtgagtcaccaagcctggctccaattctgtatatttttaaatgtaagtataaagatcaaagatacaaagtatattcacatatcagtttccatgttgttattattattattatttgccattttaaccatctccagatgaagaaaactgaatgtaaagttaaatatctccttaacttttactctatttaaaaagagactgaattatttgtgaggtaacccagttgtagctgttctactcttctctactgctagattttggaagaaccaaaaaggaataaagcaaagcatgacacagaagagaaagcagaattatactgtagtagtatgctcatattttatcagagtttgcctgtacttttgctgatttttttttctcctagcttggacattttaaaggcttattttaaatttatctcttctgtattaacaggtgagaagtggacaaatcaatgtataaaaactactatggctatcatcatttagaattttgtcttaaaagtaattggatttctggggtcctagacacataatgattagagatcatgccaccagttctatatggagccatctcaattcatcctttctcaatttatcctttccaggcatttttcttgaaactgcctaagtactggcgtctccctacgactattatatctgaaaacacattcagttttcaaaccagctgaattttatgcctgactattccttttaacttataccaatgaaaatcctttaataaattcactcacaattgctccactttctcaaacagagcacaaagcatctaacaatatttcttcatgattgatagcatacacactcttgacttcatattcttcaaaatcttggtatttttataagcattagtgccttttttttccccagtcagaagcactgacggatttattctattgggtgttgtcttctgtttggtctttagcttttcttagctgtgatcgtttattgctgaataattaagggcaattctttcccactgaaatacttttcaagttaaacattttttccttaaatttttgccccaggctacttctagatccagcgttgttccagcttactgagcattccagagggctaaggtccaagttagccaaggttttaaaatgttgaccatgtggacctgaattctttccagttacatatttgcatacttttaacaggagtggttatttctcgtcaaaagacagaacgctggaaataccagggcaaaactatgtgtttttttcttggtgatatcttgatcttagcattttactctctcttcctggtttctagcttgacctttgtattttagaggagagtaatagagtaacagtgcactgagaagcaatgggacatgacagaatagtttcagcagtgaaagtcagggaagctggtttcaaccattcattcacaagcttaaaggactttggtatctgactttgtggatgccactttctcatctgtaaaataagggggttggatcgtgtgatttataaggggctttcttactttctaacattccatattctataaagacagttaaagtctccagagagtaaagaatgtagaaaattcctgaaatttactcagctcctttattcctaaatatttttgaattctgaaattattattattattattttttgagatggagtctcactctgctgcccaggccaaagtgcgatggcacaatctcagctcactgcaatctctgctgcccaggttcaagtgattctcctgcctcagtcttctgagtagctgggattacaggcatgtgccaccatgcctggctaacttttgtattttcagtagagaaggggtttcaccatgttggacagggtagtatcaaatttctgacctcaagtgatccacccgcctcggcctcccaaagtgctggagttacagccaaagcacctgacctgaattctgagttttgattctgtttttttttttttttttttgagacagagttttgctcttgtcacccaggctggagtgcaattgcacgttctccgctcacagcaacctccatctcccgggttcaagtgattctcctgcctcagcctcccaagtagatgggactaccaccgtgcctagctaataattttgtgtattttagtagagatgggatttcactgtgttagccaggatggtcttgatctcttgacctcgtgaccctccctccttggcctcccaaagtgctgggattacaggcgtgagatactgcgcccggcccatactcacagatttctttgtgatattatctcatttgttttcaccacacccagatgatgtggatggtaggagaaatcccatgcgaataagtggaatatgttagtaactgcttccttgggtccttttgcctctggacttaactctttttttttgagacggagtcttgctctgtcacccatgctggagtgcagtggcgcaatcttggctcactgcaacctctgcctcccagattcaagcaattctcctgcctcagcctcccgagtagctgggattacaggcatgtgctgccacgcctggctaatttttttgtatttttagtagagatggggtttcaccatattccccaggctggtctcaaactcctgaccttgtgatccacccaccttgaccacccaaagtgctgggattagaggcatgagccactgcacctggcctggacttaactcttaaatgatgttacccaggaaaaccaatctatgactaaggcaaaaaaaaaaaaaaaaaaaaaaaaaaaaaaagttgcacagagaagagtggaaatatcagtaaatcagaagctaggcaggcctaatccctaatccacttggtgaccttctgcaaaacacctttctgttagccttttcacccgtgaatttttttttttttttgagacggagtttcgctttggttagccagactggagtacaatggtgcgatctcagctcactgcaaccttcgccttctgggttcaagggattctcctgcctcagcctcctgagtagctgggattacaggaacctgccatcacacccagataatttttgtatttttagtagagatggggtttcaccgtgttggccaggctggtcttgaactcctgacctcaggtgatccaccttcctcggctgcccaaagtgctgggattacaggcgtgagtcactgtgcctggcttacttgtgaaattaaagcttcaacttttactccttaggaacgtctcacaaatttccacacataaatctaaagtagacactcctgcttgccaaaagcatactctctaaaacattggttctcagacggacatagtggctcatgcctgtaatcccagcactttgggaggccgagacgggtggatcacttgagatcaggagtttgaaaccagcatggccaacatcgtgaaaccccatttctactgaaaatacaaaaaaaattagccaggtatggtggtgcgtgcctgtaatcccagctactcgggaggccgaagcaggagaatcacttgaacctgggaggcggaggttgcagtgagccagatcccgccactgcactctagcctgggagatagagcgagactctgtcttggaaacaaacaaacaaacaaacaaacaaaaaaattggttcttgagcagggcaatttcacctccaaggggacatttgacaatggctggggacatttttggttgtcacatctggggttggggagtgaagtgctattggcatctaatacgtagaggccagggatgctgctgaacatcctgcagtgcacaggacagcccctgacagcattaaacagtccaaaatgtcaattgttttttgaggttgagaaacgctggtctaaaagaaatgacaggacaggtggcttggctcatgcctatcatcccagcactttgggaggctgaggcgagtggatcacctgaggccagtagcttgagaccagcctggccaacatggtgaaacctcttctctactaaaaatacaaacaatagccgggcgtggtggcccacacctgtaatcccagctattcagaaggccaaggcaggagaatcgcttgaacccggggggcaaagattgcagtgagctaagatcatgccactgcactccagcctgggtgacagagtgagactctcaaaaaaacaaacaaacaaaaaaacagaaatgactcaaatgtttacagtgattacttctggatgggattatgataattgtttctctactgttctaaaaaactttctgttctttccaaatgtttaatattgagcacttattttacaatcattaaacaaagaaatgacaacaactgttaaaaaaaaattcttaagaactgaaaggcaaacaccaccaccactaaagccatgtcccccagatctaggttgtgagtcacatgataccgacttcagaggcagcatgtctcaaggcctctccaatgtgtgtcagggacagcagtgggagtagggccctctgagtcagcctctttgacctgggatgctgcaggagatcttagcaaacattcaagattttcactgagtcatttgcctgtggcattgatctgctcactcaagtcttccggtgttttggtgtgagggaggctaaagaggaaaaacagctgtttagtttctcattgatttgtattgtcattgagcaatacctggagcccaagtggatgtcttttattctgtggcctccacagctgggtcagtgtggaaggcttcagaccatgagaaattgttcctgggagtcaattattttaataagtgagatatcagagtatattcacagaaagaggcttccctggcactgtaagggcagccaggaataaaataaaaatgcttcttcagtgaagataattgtccaaattgaagacataggaaatatttctaatttgcctgtgtatttggtgaacatttctctctctctctctctttctctctttctctctctctctctctttctgtctccataaatgaagacatgggaaaatctattaaaaattaaattaaaatgcaacacttttacataaacaaaattcccaatcactctccttactttacctcagcccaaccaaatgtgagttaaatctcttccctttcccatgggacactagcatcttggtggcccagctcagtagctaagcatagagtaatgagtttgttaaataatttcaattacattgtttttgagattccagggtcacagggaaattctgacctgaattatctggatgaactctcacaattgtgcactgccttgttcaaatttgggaagtgctgagaagcactcatccaaggggtagatctggacttcagctcatgcagcataatagaatttcaggctcagtgatttctaatctgttaccacttgccattttctacttgaagagggcagacaccttcactgatctctgtttctatttcatcttttgaaaaatcgggatgataatggttatctggtttacatgcttttacatgcttgtcaggagttattttaaagcactttacaaatataaaaatgtacaataaaattgcagagtcggatgcagcaacccctgtatcctttgaggaatctatcacaattcatacccctcccaagccaacttttctggtactactctggaaaattgtgcttatacagttaaaatttttattttcaaaaagttgtgtaattccctttttcaaccatttttttttgttataagaaatgcaattaaaaacatacttttctttccaaatagaagagcctattctgccttataagaattgtttgaaagattgaaggacaaatgaagtcatacaacttctctgataccatattgaactcaaatgaacacattttgaggtaagaaatgagcctggaagatttttcttttttttttttttgagatggagtcttgcttcgtcgcccaggctggagtgcaatggcgcaatcttggctcactgcaacctccgcctcctgggttcaagtgattctcctgcctcagcctcctgagtagctgggattacaggagtgctccaccaggcctcactaattttttgtatttttagtacagatgggttttcaccatgttggccaggttggtctcagactcctgacctcatgatccacccgccttggcttcccaaagtgctgggattacaggcgtgagccactgtgcctggcaagagatagaatttttcacaaaaataactcataccagaaactttgtaggcccccaccgatgcccataatctttaggaaacaaactctagtgtcacctatttcctgataccttctgtaacgaccaggtcatattctgagttcctacagcactcagtgtttctcatcggagctgtagcaatggagtaataaatggcactgctcaggaagagagaattcagaaagaaaagagcagggcctagaaaaggaacaaacttatcggatgtgtagagaaagaatctgcaaagcaagtaataaaatccagaaaaacgtggtatcatggtggtcacaaaaaaaagagtggttaaattttcgaaaatggagacaaaccactcaccatgatcgtgccatctgaatagaaacacagaaatgatgacaaaaaaatggctaaagaaagaaggtcaacaaccatgtccaatgctttggatattaagaagtgttcagatggatttagcaagtagaaagtcactgacacttggtgcacaaccagacctcaatgtatttaggaggaaactgttattttggaacaattgaaagctttcatttggctgagaaatatcaactcattcttaaataggtatgttagaaggagcctctgggcctgatatctccttgattacaaggaaaatgaataatagttgcgtctgataaccatgacatatcacccctatgtttgcttgtagctttcagcagctcagaacattgttgaaaacactcattatcccaatatccccaacagggaagtgttaaaacctgccttgtgcaactgtcaatctctgatgattagataaaaacaattatgtcatgagttgtagctattgttatttacttcccaagagccagattacacaggtatctgattgctgaagcaatgtctggatgtaccacgaaattccacatgcatgtacagtataaacacctctggctatcaccttatctaattttgatcagatacaggttaatcccctcctgtatctttatatgtcctgaatttgcctcatccacctgaactttgccataatttactctcaatttgtatgtgtctgtgatggagttgttgtcattttccttttctttttcttttttttgaggccaagtctctttctgtcacccagactggagtgcaatgacgcgatctcagctcactgcaacctctgcctcccgggttcaagtaattcccctgcctcagcctcctaaatagctgggactacaggtgcatgccaccatgcctggctaactttttgtatttttagtagagacggggttttaccgtgttagccaggatggtctcttgatccgcccgcctccgcctcccaaagtgctgggattacaggcatgagccaccgcgcccggcctcattttctctatctgtctgcttaatcaggttttgcaagtttcacatttcctcaactaaacttcattttaccacccaagcaaacttcattataattattttatttttctgatgacatcagatttctgtaggggtacctattagctagagatacttagattttattttcccagcatgtgactatttcccattctatacaacacaatggcaagagcaggagtatgtttttggacaattaaagagagaaaaggccgggcgcggtggcccatgcctgtaatcccagcactttgggaggctgaggtgggcagatcatgaggtcaggagatcaggagattgagaccatcctggctaacacggtgaaaccccatctctactaaaaatgcaaaaaattagccgggcgtggtggtgggcacctgtagtcccagctactctggagggtgaggcagaatggcgtgaacccgggaggcacagcttgcagtgagccgagatcgtgccactgcactccagcctgggcggcagagcgagactccgtctcaaaaaaaaaaaaaaaaaaaaaaagagagagagaaaataactcagcttcatttagatttctattattcttctctgatccatatagtggatgttcacagaagtgtaggaaccaaaactatgcaagttaaactgttaattttagaagtttatagcagtgatgtggaaggctgaccaaagttggcgctttggtctcactataagccatagtaataaatacattaacaatgtccacaaacaacagtagacaccatttagtaagggcttgctccaagccaggcactgttttcagcttaagtctcacagccttgtgaagtagattctgtcccatcttagagcaagttggtctgaggatcctcaagggtaaggtctcttgccaaaggtcagcagaggtagtgagttcagaactgggatttaaatccaggctgttctatttctattccacaattctgcctcaactgcttctctacattttaggcacacgtttgaatactgaaaatttgggtcacagagttggagatgtttcttcttctaggccccaaaccggagcggggtgcagtggctcaagcctgtaatccgcactacttgggaagctgaggcgggaggatcgcttgagctcaggagtttgaagatacagtcagctatgatcctgccactgcactctagcctgggcaacagaacaagatcctatctctaaaaaaaaaaaaaaattaaaattttaacacaagggcccaaacaagtcaacagtaattacaacatgatctttactactgtctaataacatctcacagtgctttaaacatacgtagttaccattctgtccacttggttgcctgtaatattaactcagtaagtaggaatacttcctgccctgactaatatactcataaatatatgctctaagtcaagggtcttgcaggttctgatttaaaaaacacaatttttttgagggtcactggctttacattatctcattcttttcaagttcctttgtacgtaaaacatcctatgctcagttatatgatctgttcaacctcctgcttgacagatatgaaaacagtgctctcatgtaatttatgtaatttacatttttacatatttagcagtacacctttgtgctatgttatattgtttgagaactaatctgtttttctgatggctggaagtctaagtgaaaagattatacatgaaaataattcatgtttattatcactaggagaaagtaagacaatttagtttgattcacaagcatttgaatccctattgtgtcagacattgtattggaaactggggatacaaggaagatataacctcatctctcagagttccctagttatcccatacatatatacaattattatttgtcaattaaattttttttaaaaatttagaaaggagtttccaagtaagaaaaatcatagcgaaatggtataattggtataataacagttaattagctatagtatgaaaatacagaggaagatctaactaagttggggattattaaagaaaatttaaattagctgggtgtggcggcagacgcctgtaaccccagctacttgggaggctgaggcaggagaattgcttgaactcaggtggtggaggttgcagtgagatgagatcactgggtaacagaacaagactccgtctcaaataaaataaaataaaaaataaagaaaattggacagagatgtggcatttgaactgtctttcagattaagaagaaagttactagttagccaattcaaatataagatttacaaacatagagtacagcatgagcaaaggtgtggaggtacaaaaagaataatgtttttgaggggagaatagcaagtactctgggggtggccaaagtttgagttgtgtggttttggtggtggatggagatgcaggaagattaggaagtagattgagatcagattgagaaaggtcttccagaccagatgaaaaattttgccatatttaggcaatagggagccccagaaattgttcaaccatcatcagctttacatttcactatggtaatttggcttcataagaagcatgggttggagattgataagagcagactccaaggggccaattcattaaactcaactgccaataatgcaagagacaatgaaagccagaatgaacacagtgaccatggatgccagaggcatttctaggatttttgtagaggacttaagagaccatttgggaggggaggaaggcagaagataaggggaaagaaggagttgatatctttgatgactgatggcacttttgctaagatgaagaataaatggtagcaagaataaattgactgggcgcagtggctcatgcctgtaatccaaccattttgggaggctgagatgggtggatcacctgaggccaggagctcgagaccagcctggccaacatggtgaaaccccatctctactaaaaataaaaaaaattagctgggcatggtggcgggtgcctgtaatcccagctattcgggaggctgaggcaggagaatcgcttgaacctcgaaggtggaggctgcagtgaacgagatcaagttattgcattccagcctggacaacaggagcaaaactctggctcaaaaaaaaaaaaaaaaaaaaaaaagtataaattgggggaggggaggagatataggattcctattggaatgtattgagtttgagattccagcctggacatatggcactcttgaattgtttcctaggcgatcatatcactgtcttgatgatatctttaatcacacatatcacttgtggggaaagaagaaacttcaagagttttacacaccaatcctttactttgccatctagacaaattatatttttaccaatgccattttttgttgttattttgtgggttctgcttaaaacttcccctatatttttctaattatggtaacctagggaaaacatcaaattatgttgataaaattggctacaatctggctctaatgataatagcttagaatcatgaagcagcaatattttatcctgagagcaaacaaactttatcctgaacacatgtgttcttttgccttattcatctaatattacttgaaacttttatttttccactttgaatagtagattctgccaagtgttttaaaagcttttctctttttaggggaggaggggaacagcttttctcccttttgtctgataactgaggagtgaagatttaattggtgagaaaaatatacacactataaacctcagaatgttcccactgcttttaatgtttgatgtgcctgacagattaccctttcaaaacagataataggataggtggtgctggaaaaaaacttttccatccaagacaaaaccacatggacattgaaaagaactggcatttgcctagacatttagtgggggacatgtccttagggcacagattccatagtgaaaggctcttctcccccttccacacactccagctctctctagaaggtataatggaaagaactctgagcaagaatcaggaagttggcctttgttcctgactgtgccactttgtggaactgggcagaacttacctcattctgtgctttagcagcttcatttgcaaaaattaatgattacctcaaatgatttctgattttagccaaaattaaatacagtagttttaaaacaactgctacatattaactacttacgtatgtaattttgcactcaaaataaattatattatggaaaagaaactcaacctatgttaaccatccctgtactgatgaggaaactaagacttaggaaaaagaagtgatttactcagtattgggcagttagtgagcatttttgagccaaggtcttactttaaccagagacctttgcataatattgtactgttactaaacactttctattatttgactagaggaacacaacatattgatgcatttgaaacaataaaataataaatatttttccttaccctcggcagaaacaggatgatgagaaacattgactaaaaatttaatcaagccttaaggacaaatagtatcacagttttgaataggagattgggtaccttggaagtaattatgaagaggtgttttaactcagcagtaggctctttcttattcctgctaggaatgaagaagcacaaattgaaagtgaagaaggaggaaataaaacactgactctatgtgtaagaaaggtgacttgcaaattatgaggcagttaggaaaatgtttattttttcttattttataggctgtatatatttgagaattaataattgtcctttggagggtgtgtgtgtatgtgtatgttggagctttgtgtgtgttttagtccattttcctactgctatgtgaagaaatgcccgagacggtaatttataaagaaaaagaggtttaacggactcaccgttccacatggctgtggaggcctcacaatcatggtggaaggtgaaggaggagcaaaggcacatcttacatggtggcaggcaagagcgtgtgtgcaggggaattgccctttataaaaccatcggatctcacgagacttattcactatcacaaggacagcatgggaaaaacttatccccatgattcaattacctcccaccagctcccctcaagacacatggggattatgggagctacaattcaagatgagatttgggtggggacacagccaaactgtatcagtatgcctgtgtgtatgcatgtgcacgtatataaattttttcactagtgactgatggaccatctataaaataaacaaaagagaagagacagggtctcactttgcctcctaggctggaatacaatggcatgaccatagctcattgcagcctctaattcctgggctcaagtgatcctcccttctgagtagctgggattacaggcacgtgccattatgcccaactaatgttttgtttgtttgttgtggagatgggagatgggagtactgctatgttactcaggctggtcttgaactcactcctggccttaagtgatcctctggctttagcatcctaaaccactacaatcttaaaaaggaccagtttcctggattacctctctccctccatcatccactatctgccgtcaactctatagagtcaagggctatccctgccttttcaatagaagccctcaagaagtcactccatagggactatcttgggctttgggaagtgtacagggttggggtgggtgggaaggtgaggaggaaaggccactgtttcaggtggggttggagggagatggaaaatggaccacagaggttcagagaacaggccctttgtggaaagggggagaccaaataatgctgcgttgtgaaaggtgaaacaggctgcaaacagaaggagcccacaggaagccctgctctgagcagctgaacattctggggtcctcagactccgataaaaaagcacatttagcctacagctttatgcccttcctcctacccttgtggactctgccacagacatgccctccagattgattctatccacttgtctctagtctactgctactattttagtctaaggccttctccccgctttcctgggttatggtcacagactcctatctgagttcccagcaccaggtgcccagttgttttcatctcttaacacattccacatattatagcaagagagatctttctcaaatgcaaatcagaccttgttgcatcccaatctcaacccctttagttgctcttctctttgccctcatggtcaagttcaagctctctagtgtgggggcagatgttcctttataatttttctgcttatgtctcctgcctcaggcctcacaattctccacctcacagatgatgtctcagccatgatgagttcctctcaaatcctttaggtttcagagatgtcatttcccctgggaacattttcctgactcctcgttccaagcatatgtctgtctttatgttcccatagcacctgatcattggatcatggtagggtttatcacggtctcgtatttgtctgcttacttgtctgtattcttcacttctcaaatatgtcttctttgttcatcactgtaactcctttccccagaatgttctcagatatttacacccatcttccccctctgtgaagggaataaatggatatataacactgtattagtccattctcatgccactatgaagaaatatccaagactgggtaatttataaagaaaagaggtttaaatgattacagttctgcatggttggggagaactcaggaaacttacaattatggcagaggcacctcttcacggggtggcgggagagagaataagtgcaagtaggagaaatgccagatgcttctaaaactatcagatctcatgagactcactcactatcacaagaacagcacgggggaaaccgccccccatgatccgattgcctctacctggttccaccctagacatggtgattatgggaattaaaatccaaggtgaaattttggtggggatacagagccaaaccatattaagcaccatcctcaaaatagccttccagctgaagacagctaaggcactcatgtagtcttattttgtctcagacaaataattttacctttgaatcattgttcattaatctagattttaacctgaggccctaaaaattgtttatcatcttctgggagatcttactcctagatggtgttttattccacaggttaaatttaaacttgggccaaatctccatccttgtggcctgtgagtactgaatttgggactgaaagcctgggactaactggaagtgtggaaaaggaggagggtgtggcgctgccctcaatgatttttttttttttttaggatttctggtggaaaaggagagacactcaggaatccccagataaacatggtttagcttttgtagtcagatcctttccccaaatttactgcttctttctccaccacttctcaaccccccaaactgaacttgcctcttcaacacactcccttgtgccctatagacagtcacaagcttgacctatagagagcatgtatttcttgaggcaacgaaggtaggaaaccctattctaaaatgtttcttacacttttggctctgtctaaattctccatttttcaattaaaatggaaacgagattagaattctattctagttatgaatataatcagaacacaataaagcagaaagattgcttcaggctcttctgttaacgttacatttattcaacaactctttatggggacttgctatgagtgaggcaccaggctaggcaccgcagctacaaaggtgaagagaacataggctcttcttcaaagaaacttacactgtaagctttatagttatgaaatcatgattgcttaccttaaatgttcttgacctacattcttagatattttgagtcttgagaaatttgtttatttttttcattattatacaatgtcaattagctcagtggaatccaagatgttcggctagccttctgatccaagatagtggaccaaacatttgtatttactcattgtgcccctccatacttctctgaaataaaagtgtagatcttcaaaattaaacatatctataaagcaaagggaacagaaggggacattatcagcagattagacattccaaaaattttttagaaaataaaagctaaattgaatagtaagacacggaattattagatgtgtttggaaaaccaacagcatgaacaagataatccaagaaaaacaagttgtcccttggtgaaaatggaaggaatttgagaaatatagaagtgaactaaacaataaatacagtcatcccttggtatctgttggggactgattccaggacctccctcagataccaaaatttggatgcccaagtctctgatataaaatggtacagtatttgcatacagcctatgcacatcctactgtatactttaaatcatctttagattacttataatacctaatacaatgtaaatgctttgtaaatacttgttatattgtattgtttagggaataatgagaggaaaaaaagtctgttcatgttcagtacagatgcaactttttttttttccagaatctttttaacctatggttggttggaatccacaaatgtagaacccggctacagagagctgactgtaattaaaaccaacagcttctatttggtatactgaaagagaattgggaaatcattaaatccataaaataagaacaggatggagtgaaaaaagctggactctgtgacgaaatggacatatgtatggataagaatcaggaaagttttcataaaggaagtgccaaactgagctagttggccaaatgaactattctccaggtggatggggcagggcatttaggcagaggaagcaacaaagcacagagtgaagcccaggaaactacaggtagctgcagggagatgacggggctacagtgtgcatggagagaggccaacatggtgaggtaggcaggaggagctcctgaagggctccaacctgggaagccaggctaaagagatggcattctatcttgtcagtaataagaagcattgacattttgtagagatgatgaattgaggaagggatttatgtggtcatttgtggttctggctgatccccctgagtgctgtctgctagaaggattccaagggttaagtcctgaggcgtgaagaagaaccgatctgtaagatagcttaactaaggtggtagcattgggataagggtgtggggtgtgtgtgtgagggggatacaaagttattaaggtggtagaattgatggcaacattcatcttgacagagaatacaggatgaggagcagatttcagaggaatataatgagcccttttttagatctttgtgaatgttcagaaatggcagctggtgttgcataattgcaaaattagggcttagttagttattggcttctgagaacgtaactgcagtttttttctttccctctgccccactctttgaaagggggtggggctcaaagagtagtgtgtgtgtgtgtgtgtgtgtgtgtgtgtgtgtggtaaatacttatatacaaatttctttagatttttctttatctccttcactccttttcaacattttggctggttgttctgatattaccaaggtaatccacaattatggcaaatattcaaacaaaacaaattatagaaagtccagaaaaaaaaactctgaaataccttttccagagaccaccatcatgaacagtttggtctacagaattacaaatcttttgaagtatatagtatattcttttatgtggccattcattatattttatgggatcttagtattattgcttttaaattcatttcttatattttaaatttgaaatacttcaaaatatgcagaaaagtagagaaaataacattaacaccatatacttaccatgtagatttaagagaaatctacactttgccaaatttccttttttttttttttttttttttttttttttgagacagagtcttgctctgtcacccaggctggagtgcagtggtgcgatctcggcttactgcaacctctgcctcttgggttcaagcaattctcctgcctcagcctcctgagtagctgggattacaggtactcaccaccatgcttggctaatttttgtatttttagtagagatggggttttgccatgttggccaggctggtctcgaactcctgacctcaaatgatccacctgcctcggcctcccaaagtgctgggattacaggcatgagccaccgcacccgaccaaatctccatttttgtaaataatttttcagatatagaaaactacccaattatggctgggcatggtggctcatggctataatcccagcacattgggaggccaaggcaggcggatcatttgaggtcaggagttcgagaccagcctggccaacatggtgaaatcccgcctctacaaaaaatataaaaattagccgggcatggtggcaggtgcctgtagtcccagctacttgggaggctgagggaggaaaatcacttgaacctgggaggcggaggttgcagtgagctgagatagcaccattgcactccagactgggtgacagaacaagactctgtctcaaaaaaaagaaaagaaaagtaagaaaactacctgattactattacttctctctttctctctctctctctgtgttctagaggtttgcagtatcctgaagctggtgtgaatcaacctcacgctttttttttttttctttttttttgaggtggagtctcgctctgtcgcccaggctggagtgcaatggtgcaatcttggctcactgcacctccacctcctgggttcaagtgattctcctgcctcagcctcccgagtggctgtgattacaggcatacaccgccatgcccagctaattttttgtatttttagtaaagatggggtttcaccatgttggccaggctggtctacaaatgtatctatccataagcaataccgtatatagtaatatttttattattctattatttctattgaatgtttatattcatagtatcacactgtacacatccttttgcaatttgctttctttagaagcaacaatatatttttgagatttatcatgttgctttgtgtagattgcttactttttttttttgatggagtttccctcttgttgcttaggctggagtgcaatggcgtaatctcggctcaccgcaacctctgcctcctggattcaagagatcctcctgcctcagcctcttgagtagctgggattacaggcatgtactaccacactcggctaattttgtatttttagtagagatgggctttctccatgttggtcaagctggtctcgaactcccaacctcaggtgatctgcccgcctgggcctcccaaagtgctgggattacaggtgtgagccactgtgcttggccaattatttactttttaatttattttatgatacacaatttgtctctttatctcactttattttttgatttttttttttttaaaccaggatctcacttggtcacccaggctggagtgcagtggcgtgatctcggctcactgcatcccctgcctcccaggtgcaagcaattctcctgccttggcctcctgagtagctaggactatagggtgtaccaccacatctggttaatttttgtattttagtagagatggtattttgtcatattggccaggctggtcttgaactgctggcttcgagcaatttgcccgccttggcctccaaactctctttattttttagatattgttaacggtactatgggcagtatccttgaacatctctctttgtataaatgtgaaagacattcatagacatgggactaaaggaggtgcccatagtcaaccatgctaggcattgacaaatggcttcctaaaggggtaatacctgtgtacattgccactagcaatttgtacactttcttgattcctttcactcttgtcaaaacttactcttttttaaatttaaaattattggccaggccatggtggttcatgactgtaatctcccagcactttgggaggctgaggcaggtggatcacctgaaatcaggagtttgagaccagcctggccaaacatggtgaaaccctgtctctactaaaagtagaaaaattaactgggcatggtggtgggtgcttgtaataccagatactcgggaggctgaggcaggagaatcgtttgaacctgggaggtggaggctgtggtaagccaagatcacaccattgcactccaacacaggggacagagtgagactctgtctcaaaaataaaataaaataaaataattgtcaatattgttggttatgaaatgctatctcattattgtttaaagaggcatttcccttgataactagtgaggttgaattttgttttccagatgtgcatgagccattggtttttttctgttatgcattttctattcatatactttgaccacatgatatgtgcctggtcataacccatcaaactcttctttctctcagatacttcactttatggaaatctttttcacgtttatccctcaaacccagaattttgagtgtcatacctgttctaacataaatttgaggaaaatgaaggctaattcagaataaagaactatataagcagatggacagtgtgttctcctctaaataggggtgctaggataagaggcggtaggataaatgcacagcctcaaaatccaccacccactaaagacctcacagtacatgatgacattagcatgctgtgccagcatttctacctaccacgatgacctggaatgaaggacaaaaggggcaattgttaagtcctgtgcgtaaactttggaagagaacataccttgctttaaaccattaagggggcaggcaatagattcctgtacagggtggcttagccaaaagtggctggtcttgttctcatttatatggtttataatgattctaaatcattctcggagaaaaacagactcatttcatctccctttaattaggatttctgttactgcaatattttagtggcatttatgtcaaatgttttcttttgagaacttctcccttttactgtcttttttcttttattttaaacttttattttaggttagggggtacatgtgaaaattggttacataggtaaactcatgtcaagagggtttgttgtacggatgattcatcacccagggattaagctcagtactcaatagttatcttttctgctcctctccctcctcctactttccaccctcaagtagaccccagagtctgttgttttcttctttgtgttcataagttctcataatttagctcccacttatatgtgagaacacgcagtatatgattttctgttcctgcgttagtttgctgatgataatagcctccagctccatccatgttcctgcaaaagccatgatcttgttccttttaatttactttttgctattctgattagagagtggccatgctccatgctccatatggatattctttggaaacaaagcatttttgaaatggtaggattggggctagtaaaagagaacagaaagaattgtgaacagggtctcctccagtacagatggttaaagaacacaaatagggaagtgtgatgagtgacctccatttaattgggcgcccaagctcttggctgctccagcatgggttgccatcctgactgatcccttggctcagaaacagatatggtgctatcaggaaagcaaggccaatatctgaatattgcagcagagactgctcccatttcagaaagcaacccagattaaagttgatgattcagtttcaataaatgcttccttttttataaaaggcatttaacatcactctttcccctggtaatatggaattagcttttgggatcaactggaaaatgtcagagggcgattgtaaaaggccacctgctaaccacaggaagctgggctgatacagaatgccaggttaacttaaggtcgataatggttacttccttgtcactttttacatgcatccttgctctgcagtgggggtcataagaagtaagatgcatgcaaggtgaatttctagaagtcagcttctctgagaagtattctctgaccatacattcctactagtccccacatacgctgctgatctccccatcttcacccccattgttgaaattgctccctcattgtaactgttcactcatctgtctccaccataaagcttaggctcctagaaagtcaggaccagagctagtacagtgccccatgttcttatggaatgattttagtgccttgagtttggtgtggtgaccagagctggtggccaactgtcgtgaggccccagtccttctttttgtcatgctttccctcccagcccctccttgaccactctttcacctccatctttctacttatatagagacaaataataagatgcttgtacaaagggtgtacttgtattatcccatttgtgttgatattccacaacagcaaattaggtttttttgtttgtttgttttttgatggagtcttgctctgttgcccaggctggagtgcaatgcgtgatctcggctcactgcaacctctgcctcccgggttcaagtgattctcctgcctcagcctcccgagtagctaggactacaggcacccaccaccaagcccggctaatttttgtatttttagtactgacggggtttcaccatattggccaggctggtcttgaactcctgacctcaggtgatctgcccgcctcggcctcccaaagtgctgggattacacgtgtgagccactgtgcctggcctgataaggtttaaagattaaataccatgtcgttaaatttgcaaatctctcgaataggaaaatcaggaacaatgacaacattcggagcttcccagaaggtaacaactatggggagttttgtgggcatctgagagaagcacacacacagatggtttgcctttcattggtccattcttgcccagaaggcgacactaactgaaacaaagaagcctcatatgagaaggacatggggtcacagcagcttttggggtggccctgggtccttgatctggtctttctctggctcattttgtattgctcactttgttacttcacaatccagggcttgtgacatttttcttctctggagtggaaatgacagagctgcagaacacaagtttctgattggttcctatgagtcaggaaagagggccagttgaaactgggctcacacacacacacacacacaaactaggctcacatgtgttttcccatcagctaaacaagttttcagaagtacagaaataactcgttggggaaggggacccaggacaatgacaatgtttttgatggtaatgtctgcagaagtaaggcaggtttcctctgtgcctgaaaagatggcaccatttgaggagatggcatactcgtggtggaatcttcattaagatgtcaaactaagctgtaggaaatcaactctagaaaacagctctaatgtgagaaaacatatatccagttttatagagcaagagctgtgatcatggtgacatttaacaactgtattagttggccaagagggtaaaaatatacttgacctcttagagcaccataaatactctcagcttgtgggccaactgtgtcatggtcttttttctagcccctcctctttctcccttccttcttgtctctctcctcctctctcttccctcccctttctcctttctgaccctcttttctcttctctatcttctcgaaccttcccttcctcctctcctttaggtgctcagcacctctttgattcaataaacatttacggagctccttcttgtgccaacgactgtacacagagctgggatgtcaagatgaatcagttacatttcctgcccaatgccaagggatggcttgatgggttttgaccagcccctccctggactcccaatttcttttttttttttttcttttttttttttagacggagtcttgctctgttgccaggctggagtgcagtggcacgatctcggctcactgcagtctctgtctccctcccaacttcaagcgattctcctgctcagcctctcgagtatctgggattgcaggcatgcgccaccacacccagctaatttttttgtatttttagtagagacagggtttcaccatgttggccagggtggtctggatctcctgacctcgtgatccacccgccttggcttcccaaagtgctgggaatacagtcatgagccaccgcgcccggtgccctggactcccaatttctacctcctggaacgtgctttactcaccagccttggtgttattctgcaatatggccaactgggatttttttcaatcttacagaaattattctcggaaatgtttgctatttttttttaatgaagctacagcatacaatttaaggataaataatgtacttactctgcagctattgtttcaagtcaaatccgctgattactcctccaaaattcttttcttaataaaatctctgaccctttcctcttcctgttagaacttctggagctaccattgttcctcctcttgggctgctcataacctaggggagtcacagtgaaattacttgctttaaaattctttaatcactctgcgagttgttaggaaaagctgacacatctgatttggaaactcccactccagtggactgttgtgcctcagcacacagggacgggtggagcaaaggaacaagaagccaaaaactctcagggcacttactatgattgtgtaaaagagagactcatcaattaacacaggtactggcaagtgcacttcataatgcctccatttctagacagatcaaaaacagtgtgccctgtcaataaatgctgagtttctgtagcagcctgattgagatcagctaacctttaggccaaaagcgggattcttccttgctgaagcttttggcaaagcatattgagcttcatgccagggattagattaactcttgcaaaactggttcaccaggaacaatgactcagtgttttttttttagtatccggcatattgtgtggagcagctataaatatatttacaagctggagtttcaagggaggggagtaatagcttgctgaaaaacatgccaactgagttatgggtcttcacgcagccagcatgctgtgttttgggctctgcctcttgtaatttttagaaattaattagtttattctttatttatatttatttatttatttattttcagatgggatcttactctgttgcccaggctggagtgcagtggtgcgatctcggctctctgcaacctccgcctcccaggttcaagtgattctcctgcctcggcctcctgagtagctgggatttcaggtatgcctcaccatgcctggctgatttttgtatttttagtagaggcagggtttcaccatgttggtcaggctggacttgaactcctgacctcaagtgatccacctaagggtactgggattacaggcatgaaccactgcacccggcctgttggttgtaattttattttcctcctcaaggactttgagcacattatcttctctttaataacttgtttccaccctcctttgtgcacgcgcgcacgcgtgtgtgtgtgtgtgtgtgtgtgtgtgtgtgtgtgtgtgtattttctgatctccctacgggggcagagagtctcaagcaggtatgtccatgttattaacatactgtctgcttattaactaactgcaccaatgatgaaagccaactgacaaacaagtgatgctcttatccctccttcgcaagcaatgaatctgaaagccaagagaagttttcctttcaacaggaagtgttttggagtccgaacaactctgcatttagacagtgcagcttttagttacagatcttggcaatggggcaggcagagggagcggcaactacagactttgccgtaggactgttttctatggagtgtgtgtgctctgacgagctagtgacaggagggaggttacaaaagcatttactgaaataaggatttctaatagaggagctttttaaaagtattaaatatgctaatgtgcctagggcatagtcaacaaagagttataatacatgtcatttttcatatttatcaaggaaaccatgtcacccgcagcctttctcaatttctggcattctgagaaacacactgtagtggtgcctgagggtctggggaaagaagaatagaatgaatggggcatctcagaatcgtaaactcccccagttgtagttcctttcgatgttggtcgttggatgaatttccagtttctactattgtggttggattggggagagtagctcaaattgggaattgctttttgaggatctagggcttctggaattctcccagtttctttttacctctttatgctatcttgtctactttgaaaaatcagtagcatccatttgattgcagagctgaatctttctatacagtgaggagttgtaatcacattacttataacctgcttatttaactttttaaaggtgcaagtcattgtaacctaagtatttactcacactgatccttaatatactcccctttcttatctgcaagcttctttctctggtttctcctaactctgttactgctcatgagtttaaaactttgtcttctcagttcctggcttcacctgtttggtctctgctctccaggactctgccttggaaatctgactcacacttctatatgtccctggggctcaacttcgggcctggcgccagaatcacccaggctccaagcaagccttgtagactccactcagtcctttgactcaaggaaatctccacttctaaatggctctccggttgattctgatgccagtccagggttgagaaccaccgctttagcttctagacacacagccccctcccctttttcctggagcccctcttgggtcatgattctattttccctatttctgtactcagaagggataaaaatggaagtgtatgtgaagttgctactacgtcccaggtgctttaaatatgttattttattcaatcttcacaacagtcttatgcagtctctatttttattttaagaatgaggaaaacaatacttgggtgcagtggcttatgtttgtaatcccagcactttgggaggccaaggtgggtagatcacttgagcccaggagttcaagaccagcctgggcaacatggcataaccctgtctctaccaacaatacgaaaattagccagtctcataacctggtctataaataaataaatagataaaaatttaaaaataaaataatttaaaaagaaaagaatgaggaaaacaagattcagagagccttggtcatcttcccaaaggtgcacaattaagaaatggctaagcaggggttctgactcagatctgtcagcatctacagctttgctatttaaaagagcgtggtccgtggactagcagaatcagtgtcacctgggatcttggtagaaacacaaatacttgagtgccatctcagacgtactgaatcagtttcttcaggggtagggtccaggaatatgcattttatgaaggcctctaaatgtttctcaaagtttaagaagcatggggaactatatcttttcctactatatagtcttatctctttccttgtttctttactccaaagtattgccttatttctttcccagaaacctcactatcagctcactgtgcagccttactcatatcttcctcaaccagcagttttattacacacacccttctcatttcctcacattgctcatggtatctgactgagtacagggatccaacctggctttgggttttgcactgtcttgcctcagtctcttaatttcttcctatgtacattttaagatattgaagacactaacttccaaacctcttctctaaatctgacagtgaagcagtgtgtgtgtgtgtgtgtgtgtgtgcatgccagtgcatacaccacacatacaagcacatacacagagttaagtttggtcacatttacttcattaattgatatataccacaactgagaaaaacttactggcattctgctccaagcttgaattcccagacgaaaaacaaacaagcaaacaaacaactcctccttacacaaaaatatctagtggccttggaaaattccatttaacattaaattgtgtctcttcaaagtgaagcagggtgggcagatttttgaacatgaatctactgataacacaacacctcttcaaaactagaatctcattcagggttaaatgatgtccaagtcaaacctgagatgctagcatgatgccccatcctcagtcagaggtttcagggtggcaaacaacttttgctcactctcctctgcctctctctatatttgcagaaagtccagctttcactgcaaaagttcgataactctgtaaaacagtttgatcctaacttcaaaagaatttttatgctatttggaatacataaaaaatgaatttattccaatactttagccccataaataatgcataatgattggtgaaagattagcattttggagttcaagtacttaaagctttcttggatggataatgcatcacccttaactagcataaggggaaatagaaggttgacaaggaaaacttaatttagggttctttatttatttttctctagttatgtttaccttcccaggttgttttattaatgccacttttcacaaggatatttcatgaataaatatcaggttgtatctctggccatctgtgatgatcacgtttttatttttaatgagttgctcatggattatatcctaactggaattgcagtcagtatattgagatgcattgactccatttctgtctttcattcttctttctcaatgtattctcactggattagcactcttagccctgaggactcttgggccagttttattactaaaagaagaattacagttttgctacacagtgaccttgcaagaagtatcagcacagctcaatttcaaattctcctcaaatatcaaatatgttcttggtatattttgcttagcagtttattgccttctcatctccactgtttttcctgagtaacagctcagaaatctataaataaaacttaataatggggagtgactcaaaagtctggttatttttattagtaaactattttaggggtgaacacttcacattttacattctcatgctccacagtgctgaaaatagtctgaattttttttgtgtgttaggttgatgagaatatttttgagatgactagcagaaaacagaatcattaaaacagtgctatcagttttcatgttgaataactttacaggaaatgatagcatctttttttctttttttgagacggagtttcgctcttgttgctcaggatgaagtgcaatggcgcgatctcggctcaccgcaacctccgcctcctgggttcaagcgattcttctgcttcagcctcccgagtagctgggattacaggcatgcgccaccatgcctggctaattttgtacttttagtggagatggggtttctccatcttggtcaggctggtctctaattcccgacctcaggtgatccacccgcctcagtctcccaaagtgctgggattacaggcgtgagccactgtgctcagccgatagcatcttaacaataaacatgcaaagatttgtaaatgttggcaaacagcaagaaaaacatatttagaaaattgtgctatgctttaatgtcctgtctgtacgataatttacttagctccctaccttccccccagcccaccagaatgtttaaactgaaatttaaagcacagttgatcttggcttggataggcagcctgcatattaactgaggatttagttagtatccaggagcagatctacttctcaaagtgagattcacatagcccccttggaagctttcaaatagattgactagccttttaaaattcctcttctcccctttcttattgcccccgccttgtctagctgtatgctaacttgctgcatagaatcctgaatttctggatttctacatttctagctcaatgaatggggtaaatcaaaacttaataacactcttgattttgaaaagcttcagtgcttcatgtaagactttttgagaaaagatcattttcatttatttctgttttatttctagcttaatgattaaatgtaagctgttcaatacctttttcaatatcccacttgttaaacccacactaaacctcagaaatattgagtcagtgatctaaatttccattcaaaatttccacaaagcagaagcataaatgttttcattgtcattacaaataaacagacagggctgggcgcagtggttcatgcctgtaatcccagcagtttgggaagctgaggtaggcggatcacttgaggtcaggagtttgagaccagcctggccaacatggtgaaacactgtctctactaaaaatacaaaaaaattagctggattggtggtgtgtgcctgtgatcccagctactcaggaggctgaggtaggagaatcacttgaacctgggaggcggaggttgcaatgagctgagattgtgccactgcactccagcctgggtgacagagtgagacttcatctcaaaaaacaaaaacaaaaacaaaaacaaccccttcccctccacgaaagaaaaccccaaataaacagacaaatgaaagcaatgaaaacaggaaaataattttgacacctacttctgggatgttatgttatgctttgcattggttctatttattagacatgttcccatctttattatttaagagcagataaaataacctcactacattaatctcttttgctctgcctctttccatatgattcttcactagcagttcccaaaacaaaaaaattgtgcaccaaaatcccaactgagactcaattgtttgctgactcaacaactctaatgagaaatcttatacaagagcttttgtttcaaaaggaagtgccaggaaaattttgcttccctcaagcaatggcatgttttctttttctggacagtgagaaccatgtaattaaacatattttcctttgtgctttggctgtcaggaaactcagagccaaacttgtagcccaagttttatggctatgtaagacattatggcccatatatctggactcttcctttctccttggtattgatcttcagtcttggctttagtttacaaaatatgccattataaaaaataacagtatctgtaggctgtctgaaattattatggaaaaagtagtgtacaaataaatgaataagtcaattgtttgaaaaacaatgcatttgtatcagaaataactttgtgagtggtcttcaggttcctagtctatttcattttgatatatatttcttgtgggtttaccacgtgccagacaaagatgttcctggcaggggggttaataatgttaacagtactcagtctttctagtgccttacaggctatagaaggagaaagaaatacaaaacaaactaaaataggtattcaattgcaacaaaagcaacttgatgtaggggtacaggggaaggaataattcattctacaggcctttaaaagataaagaggtatttcaaaggcaaacaatggagagaagatcattctaagctaaggaggttgcatgaagaaagcataatgtcactacttttttttttttttttgagacagggtctggctctgttacccaggctgtagtgcagtgatgagatcacaggtcactgcaacctccaccttcagggctcaaaccatccttccacatcaacctcccaagtagctgggactacagctgcatgccaccatacccagataatttcttttattttttgtggaaacagggttttgccatgttgctcaggctggtcttgaactcctgagctcaagtgatctgcccaccttggcctcccaaggtgttgagattacaggcatgagccaccgcacccagcataatgtcatcaaattgaagtgagaaatgggaatgtcactaccaaccataagtaataaacaatagattatcattaactttgctcctagagaaagacaagtttatttagaggtgaggcgagtagaatttttttaagggaacttctgggtaatttaacaccatgatccttctcgaatgccttacaacgtaaaaatgtagttctcctttttcttttcttttcttttttttttttttttttgagacagggtctcgcttcgttgcccaggctggagtgcagtgacacaatcttggctcactgcatcctccgccgcctgggttcaagtgattctcctacgtcagcctcctgagtagctgggattacaggcgtgcactaccacgcctggctaatttttgaatttttagtagagatgaggttttgccatgttggccaggctggtcttaaactcctgacctcaagtgatctgcacacctcgacctcccaaagtgctgggattacaggtgtaagccaccatgcctggccatttttcttgataaaggggtgtcattggggcttctcttactcctgtcactcatcatgggtgccatgtcttttttttttttttttgagatggagtcttgctctgtcgcccaggctggagtgcagtggcgcgatcttggctcactgcaagctccacctcctgggttcacgccattctccggccgcagcctcctgagtagctgggaccacaggtgcctgccaccacgccctgctaattttttgtacttttagtagagacggggtttcagcgtgttagccaggatggtctcaatctcctgacctcgtgatctgcccgcctcagcctcccaaagtgctgggattacaggcgggagccactgcgcctggcctgggtgccatgtcttaattgacaaccacaatgaagagaggaaggaaagaggaaagaataagacaatacaagaagaaaagggaaggaaaagccaatgacagacattaactggattttcccacaaagagaggtcatgaggatcaagagcatacagaagtttgcaaaataaagagtttctctggcttggagttgaccaaaataagagaaaggtgaagcgagtataatgtacggagacttctcctgggagaagttgtcagtggagaagttattgggtcatatagtgatggtgtgcagataggacctggtggtgagttgacgaggagccattgccattcagccatcaagaatcatgatgtgtgttgtgtaggaatggagaggtgagtgtggagtggatggggcgtagatggagaagcaggaggattcgtcatgcaccctgaggcttgccagtattgatgtcagacttcctccgaccgtgttgccaccctggactgtttgactttggtagctattttaaaacagcaagaagagctgcttgagaagaacctgggggagatttcacaaccagcagctgcatcgaatctccctggatgtgtgcttttggaaacaatttacacaagggctgatttcaacatgcactaatatatacagtttagctggcattttatatggaaactttaataaaatggttctaattagtgcttaatttacatagattagagagttctacaggcccacacagtagggcttggggattttatgtcatttgatggagatgccagtttgattcagataaagaaccaattttagggaatactgctgaagtttgcccgacacaaatgaaggagttgtagcttgcatttcttttacccactcttgttcagtggcttgaactagctttctgtctcttccacaagatttaggacaagatggatttctgtgtcagcatgtagtaggagagctttgattttctagttctgtcctgtgtggatctgtatgtagctcagattcccccacaatctaggtcagagaagctgctagccttggtgcaaagttttcaaaaaggcttctattcagagagatgaataaggaaaaactcacaccctacgtgcgaaggttgcttaatgagaggtgtgagatggagctcagttgccacttatctctgtagttgggtaccgttgtgcagtctgtgcactgcccagccatttgcagtgaccccaaagaggatcatctggtcatcttgcggggagagactgtgagttcctgccatgtcacttggtataacatgagaaaactcaaaactctaggcagatctttgcacctgccctacttttctacctgctctcacaatcttcttgagggtgaccagagtccaagtaactaagtgtaattcaatgtggtgaatgatatgattgctacacaggagtatctattaaggctttcaaaatgtaaagaggaagtgactcattcttcctggtggtggtggttgcatcaattggtgtagtctattgcctctctcccatcaacaagggacatttggcaaagtctggagtgtgtcaactgtggggtggtggtactaccggcatctagtggatagaggtcagggatgctgctgaacattttacaatgcccaggacagccctcccacaataaattatctggcccaaaatatcagtagtgctgccattgagaaatctggttatgtaacagataactttttttttttttttgacatggagtttcactcttgttgcccaggctggagtgcaatggcttgatctcgactcactgcaacctctgcctcctgggttcaagtgattctcctgcctcagcctcctgagtagctgggattacaggcatgcgccaccacgcccagctaattttgtatttttaatagagacgaggttttaccatgttggccgggctggtcttgaactcctgacctcagatgatccacccacctcggtctcccaaagtgctgggattacaggcatgagccactgtgcccagccaacagataactttttaaattctcagctgtttaacccaacaaataattattttcttcctcaagctgtatgtccagcatgggttggcaacatagccctgtttttcctagtcccttcaagaagtctattgatggaagatgcatttttatgtgggcttctaccaccactatgagagggggaaggaaatttgttggattgtaccctgaattttaaaaagcttctgcccagaattgacatatattctttccaattgcattttattggccacaatccatcatatgaccatgcctgaattcagagggagtaggtggagaatacatttttaatttttaattttttttttttttttgagacagagcctcactgtcttgcccaggctggagtgcagtggcgccatctcggctcactgcaacctttgcttcccaggtttaagtgattctcctgcctcagcctcacaaatagccggaattacaggcatgcacccccatgcctggctaaggtttttcatatttttagtagaaatggggtgtcaccatgttggccaggctggtctcaaactcctggcctcaagtgacccatcctcctcagccttccaaagtgctgggattacaggtgtgagccattgtgcccagagagagtgcatttttgtcttgtacccagaaagaggagagagtgagaataatcatgaactaccctaatgactatcatgctgatggtaatggtggttgtaggatggtgtgagaatttaaagacggcttcactcctgtcactttgcttacttactgctgtataacaaactgccccaaacttcagggatgaagctaacaaaaaaatcatttaatttgctcatgaagttgcaatttggatagggctgtgtagaacagctcctctctataccatggggcatcagttaggacagctcaaaacctgggagtaactcaaaggctgggggctataatcatctgaatgcttgctcactcctgtgctctcatgtcaggcagtggatgctggctgtagacagagacctcagctgtggctgtcagcttgaccacctactcccagcctctacatgtggctgtttggctcccttacagtatggtggctgggttccaaggcagaaagtaaatgctgccagtttcttaaagtctgtctgcaaattggcacagcattctttctaccatattctattcatcaaggagttgtagaggccaattttaaggggaagaaaaatagaccctatgtttcaatagcaggaaggtcaaagaatgtggaggccccagaaaactgcttcccaggtaagtgacaggatagaaaaacaagatttttttttttttttttgagacagggttttgctcttgttgcccaggctggagtgcaatggcgtgatctcggctcaccacgacctctgcctcctgggttcaagtgattctcctgcctcagcctcccgagtagctgggattacaggcatgcgccacccagttaattttgtacttttagtagagacagggtttctccatgttggtcaggctggtcttgaactcccaacctcaggtgatccgcctgccttggcttcccaaagtgctgggattacaggtgtgagccaccatgccaggccagaaaaacaagacttctttaggtggagtttggggaatgagctttctggacaagtaaacggcatgcatcaaggcacagaaacatcagagctgcatttgaataaattctcctagctggtcttacctcctagctacttacttctactgttgacatcaaccttataaacttgctagaggctcagtgtggggaaacaaacaaacaaagcctcatgaaacgttttgatccaattagaaaatgtctattaaatacattgtgtttcacaaatgtgaactattaatacaatctgggtttgttccgatttaattgtctaaaattatacataattcatcttgccaacaaatgaaattattgaaaaattaaaaatatcaccaccaattttttctattaaatgtatatttttgtaatgatagcttaagtttcatctcagtttgagatttagtacactgtggcattcactctggttggggttcatttggctctgagcttcaaggttcaatttagacttcaaagcatgtcggacttgacctgaggcacgtttttaacaatcaggtgcagtttgtaaggttatgggttgaggaatagcataaatgggccatcctttttctgattttgagaagagaatgactactaatacccaggtgtgttcttgtctttcttgagtcaattctaacagcattggctgtgggttataaaaccataaaattttacagccaaaaacaactttaaaggtcgtttagatggaacttcttcattttgcagatgaggaaactgagaatcagagacaaagtgacctcagggcattacaacttactattactatattgaaagaggaagggaagctggtgcaagttgagggacccactgatgaactgcagggtatccaatgttgcccctgtgtttgggctgagggagaagcagcttcttagcttctgctatgctgacttatcttgtgatctctgtcccagcccttggctgcctctcctccttgtccccaggcctgcaccattccatctgcctcctgattattcactgacagctgccttttccctcaccctttgttctcagtttttaaaaatccaatggggagaagcttggattcaaatgatagcattttcagctcatgaaaaattctataacaagtgtatttgaccgtttgatctctggcttctcccacacacttgccctttatactctgacagccataagcttcatttccttgaagcagattgcaatttcaatggaaaggaaataattgtgtagctttcaagctgagttcagttctaaaaaggactgagcaaagctcaatcctgggctattgtagaatcttagtcactgaatcaggcagtgaaagagctctctccaagcttcatggttatgatcttgaaaaacaccagagctaggttcaaattccagccataccatttcctaactgtgtgattttggcaaatcacacaaatacttaaaattctttcgactcggtttcctcttctgtaaaatgggaacactaattaatgctcacctcaaaaggttgttcattcattcaacacatattcgttgggtgcctcctgtgtgtcaaactgtttcagtccagtgaggaagatggacatgaatccaagagtcaccaaaaaaatgtaaagtggcacctgtgatgagtcacaaaggggaggtatatgagaaagtgtgtgacagtatctaacaggtgagggcattatataatttattgttgcaaacaggacatttttgagcatgtaagagggtgtgttaattgtcctggaacaacaggcataaatcaggactttctgggcaaactcaggccctaccccactcttacctacccttagtataagagggaaggttgggaaaggctttcctggggaagggaagaagaaactgagatccgcggaataagtgaggattcctaggcaaaaagaggaagacagagtggtttaggccaagagagcaaacagtggtgcaagactctaaggcaggacaaagcatggagcctgcagagaacagacagaaggtcagtgtgatgaagatgggaggggtgcgtggctttaaacacaggccccttgcttgttggtttgccctgtaggtgttaagaaatgaggctatatcaaggtgaattttaagtagaggtggcacctctacttaagaccagacttgcagctttaaacatcagtctggctgcaaggcagaatggattagcattgagtagtagttctggccttggctttccagaggaaacttctaaacaatatcaaagccttggtgtcacccacagagatcctgatttaattagtttaggttggctcccagtaggttataaagtgtgtcaggattgagattcactgtagaaggaagtgtgaatatggagaagaataattacaaggctattgcagtagcccgggtaagaagtgatggaataggttcatggcagtgggtttctgaagcagtggttctcaaactgtagtggatttgagtatcacctggaagtcttatttatttattagagatggtctcacactgttgcgtaggctagagtgcagtggtataatcatagctcactgcaaccttgatcagccttcatctcctaggctcaagcaatcctgccacttcagcttcctgagtagctgggactacaggcatggaccaccatggctatttgtttgtttgtttttaatagagacagggtctcactctgttgcccaggctggtctcaaattcctgggctaaagcaagcctctctccttggcctcccaaagtgctgggattatagccactgcaccttggcacggaaaccttgttaaaatgcagatatctgggtatcattgatttagtaggtcgtggatggggcctgagaatttgcatttctgacaaattacctggaggcgctagttgctagtttagagatcacacttagcatctagtgggtagtggtcagggatgctggtgaatatcatacaatacacagaacagcccttttgctgatcactgatcgagcaaaaaaaccatctgatgtggtagataacatcaacaggatttgatcagcagggtaaaggacaactccaggactcttacagttttctgaatttcacaactaaatgacgagtttcactattcattgacattcaggagacagccctacagacctgagaagatggtgaagtcaaagctacacatatatttgagggttacctttgaaacagctaagaggatacatcaagcaggaacatatatgtggaacctggaagggaagatcattacagatataaacttggggatcattaaagccaggaacttatcaatggcatcagtcagttctcttttcttttactcttatcattggtgtcaaagctctggcctctttttgttggttccactcaggtgccgtgatcctccagcctcagcaccttgctgtgagctctccttgggaggctgcctctccctcctccttcagaatttaccccctacttctcctttgggtcccacctctcaggcttggtcatgtgtggcattagcaagcaggtgtgcgtgtttccttctgaagcacaaatcaaagccatggttatgtatctgtgggattatttgctaaatggccacctctcctgctagattctaagttgcctgcagtgactggagaacatccctaggtatcagatgctcaatgtcttacacttatggaaccgtcaaagacagctgttaaatgtccaatgggtcagttagggagatggtggttgttaaaactgtgatgagttctcaggaagagggagaagcagttacctttgtgaagcagttgttggtatttacttagtaatgagattaaatttcctaggacagtgggtgtgtgaaccagcaatagcgccatctgctggaagtaagtgatacaacaactattatcttgactaggctcagggctgttaaaacagtattgctctgggagaaaagaatcattttttttaaggttaaaaatgtgagtaaaattctttagagtgaagatagaatttcttttgaaatggttggaaaaattggataattattgaaaatagtgttcagttttcaaagaggagagaaaccttcaagtcactgtaattaagagaagttttattgaaagaacacatggaataaggaagttagatatctccacccaaaaccagcatttcagaaaacagaaacaggcaaaaatctggcggagtgtggtggctcatgcctgcaatcccagccctttgggaggccatggtggaaggatcgcttgaagccaggagtttaagaatagcctgggcaacatagtaagatccccattttcttttttcttttcttttcttttctttttttcttttcttttctgagacagagtgttgctccttttgcccaggctggagcgcaatggcatgatctcagctcaccacaacctcccgggttcaagaaattctcctgccttggcctcctgagtagctgggattacaggcatgcaccaccacacctggctaatttcgtatttttagtagagacgtggtttctccatgttggtcaggctggtcttgaacgcccgatctcaggtgatctgcccacctcggcctcccaaagtgctgggattacaggcatgagcccccgtgcccagccccaagacccccatttctattttaaaaaaaaaaaagaagaagaagaaggaaaagaaaagaaaaatggaaacaggcgaaaacctaggcttctcaaagactgaagggtattttggaactgactggatattgctcatctctggctggttgtgttgcagcctcgttggtggcaagtgcagaccctcagtcagtgacctcctttgttgctcttccatcaaagggcccccttctcctgcccaggcatggtgttactaatatggcgatggtaggggcaggggctgcatctatgacggggagaggtatgagagtatactcatcattctgctgttgtctttgttagtttgtttctaatttctattgttggggagaaagataaattcttccctaacctcttgggatcttcacctgggtctaagaattaaatcactgtaagacaggttaacaggagaaaaatatatgagttttattgatttttacatgtacgcggagaccctcatgagacagcagaagacctgaagaaatggacaaagcagaaagctctaataccttttagacagagaaaccataaattcatgaagagctgacaagacaaaggggtttgggccagtggcagtaaattgtgggaattcactagggaggtgtaaagatagaggaagataagggatagtttagaaagtttatttgtacagctccattgcagcatcaactcccagtcaatggtgataagagttattttcttattctggtacagggagggcaactttcttaaataaatctttttggcttacgacaggtagaagagggcagatcacatagccctttccggcatctgctgtttctcaggtgactttagctcaaaataatcaacatgccacatcagcaaattttggggtgacatggcctgtttcgctatgataatgggaaagaaatcagactttttaactttgaattagaaaacacaaactttgactatgtcccacaatttatgtgactgatttcatattctatcacatctattttatattctctcatattctcctcatgaattttcccctagaatgttgggggaattttgaaatgacttggggggcatgctacaattcgaaaaggagagagacatactctccaattctctccctgcctgcctcacaatgtgcagctctcctctgcttcttcttcttcttttttttttttttgagacagcgtctcactctgtcacccaggcttgagtgcagtggcgcaatcttggctcactgcaagctccgcctcccaggttcaagtgattcttctgcctcagccttccgagtaggtggtactagaggtgtgtgccaccacgcccagctaatttttgtatttttagtagagacggggtttctttatgttgaccaggctagtctcgaactcctgacctcaggtgatctgcccacctcagcctcccaaaatgctggaattacaggtgtgagccaacatgcctggcctcctctgcttctgattcaactgctgctaccgatagacttactgaaggatttgaagccaaatggtattaattttggtcagttacttccctgtatctggtgtcctcactagacagaacttctgtgtatggctacttcatagaccccgaccagcctacatattgtttgctctaaggtctagtgccctctcttatttcactaagatacagccactgttggtgggggagtcacataacatggaacataatcactgtatcagttcaggtgctcttgattcaagtggatttaattatgagggaatttattccttacataattactaagtctagcattagagtggcctgcagatgagggttgatccagtggctcagtgatggccagaacgctgtttactttttccattctgctatctatggggttggcttcatcctgaggttgttttcctttctgtcacaggttttacatcaatggggtaaactagtttacattgtggtaacaagcaactctcaacttttttttttttttttttttttagactgaatcttgctctgttgcccaggctggagtgcagtggtacagtcttggctcactgcaacttccgcctcctgggctcaagtgattctcctgcttgagcttcctgagtagctgggattacaggcatgcaccaccacgctggctaattttcgtatttttagtagagatggggtttcttttttttttttttttctttttgagacagaatcttgctctgtcgcccaggctggagtgcagtggcgtgatctcggctcactgcaacctctgcctcctgggttcaagcgattcttccgcctcagcctcccaagtagctgggactacaggcgcatgccaccacgcccggctaatttttgtatttttagtaaagacagggtttcaccatattgaccaggctggtcttgaactcctgacctcgtgatttgcccgcctcagcctcccaaagtgctgggattacaggcgtgagccaccgcgcccagccaactctcaactctagtagcttaagacaacaaagatttatttcttgctcttactgtctgcccatctgtatcaccttctctgcaggacccagtttaatggagcacacacagaaaaaggtgctggtcactagggccaagggaacaatggctctggaaggtttttcttgaacaattcagtgttccagtcttggagcaatacatcttatttctactgttaaatccatggccagaactaatcatgttgtcccactcaccacaaagccatatgcagccccaccatgtgctcaggaaagaggaatgggaagcatttgatgaacagaaataatgacttcaacaattgggactatcagttcacagtttcaattgtaaaaaaaaaaaaaaaaaaaaaagacagaaatagaaaaagaacaattgaaagtacttgctttctcatccacgaaaaaagttggtcaaagcctcttagtgtaagtctatagcagatgatgcctgataaggaattgtacataccgttcttcgtgaaaaccaagagtaccatgtatgtaacatagttgctttgggcttcttatagcagttaagagtgtatcagcaggcctccatggtatttgaatgttaaaagctttcattccccctggaagaaaacacatagctaactaaagaaagaaaaaagaagggaaaaagaacaaagaaaaagaaccactagagtctctgaaaagagcttatgagatacctgactgtctgcgccttctaagtatgtaccatgaaaccttagattcctacctcattttgtgatggtgtagaaggcacattggccaccagcaacccttgtaaatatttgcggatttgaatttcacaaattgaaacccagactgctgagggctttgctgctaacgtcaaagagctggggcaactaccacaaaaccacatgtgggagactttttagatgaggagataggaaattcctaataagaaaagtttttttgtaaaatactttctaatgctggctctttagagaagcacattttacatgtgcaatggtgcaaagtcctagcactaagatttcttcactcacagaaagaaagaatgatgcaggtgctgttcacatgcggccggaaccatgcccttgccaagcaggtcagcggggcacagggactgcgctcctcatgatagtgcagattggctcggaagtactcaattctgtggagtcacagcgccctctgacagatttcagtttctggaaaaggaagggcccccttcagggtacctgctgttcaccttccattagattaaggttgaagagcgagtggccatttgtaggtactggtatgagatgttcctagctacccgcatgtcagccccgggaaacggcaacatttcccacccttcttaccctgggtcctgagtaggaataaaagttagtgattcttaggggcatattgagagctggcaatgatacctctcacaaatccatcccccagagataaggggtcccccatgcctttgatgtatttgggagctgtgctgtatgtgttctctttggctccccagtggagaataataacaataacaaccgcgtactaatacaacccagatgtcagcacagaccctctgttctctgtcttccctgagatatctgtatcttctcagggattactgtcggttcaggcctggctcctgctttcagcttgtgggaaaactcactccatcttcattccataacctcacatctcctatgccagttcccttctctgtgctccatgctgaaccaaatgccacactcatcccctttgctttgaattatatgaaaaaaagaaaaaaccctcatggggactttatgtgtaacagtcttcactgcacatttgataacacagatgggggtttatatcctagcagagcagatattgtcaatggaaaatggaaacaaaacaaaacacaaaagacaatcttcagccatcactatgtagcttggctatcatcttttgctttctcctttacttctggagtccccccacataccctcagaaatggagatagactctacatcaatctctgctctgggaaatctactcacatatccaaaggcaaactaacaagctcttgctccgacaacccatcgacttggggtctcatccctccctgcctaccagtctctgtgactgaaaggggcccatacagagacttattttcccaggaacgtgaatgatatccttctcctgttccttgaccttgggaggcagatttgattatggtcagctttgattcaaagtaagtttttttttttttctcccttaggagaatgttgtgaggtgctgattgttctctgcttcataatcgtatcacttattactgataatctttttctgcccccagaggttgctgaagaatgtagcatatacagtggacacagagccctgataatacaattactaaattctccaaggttgagggcctggtcttaggtcatgagattactgatccttgccttctgcctgctaggaaggcccaactaatttcacagtctttatcagtgaaccatagtaaagggggaccagaagagaaaaaggttatgtcttttgggaaaatgccaaaatcatattgtgaaaatccttcctactgttcttctcatgggagggggaggactttggacttgtttctctccttttcctgtacatttggggatgtcagaaccgtctgtttcctcatctacacgtggttagatgccgacaacaatctcttctcttaaaattgcttactattagaccagcagagtgtttggtattaattgagcaaggaggaatttgtaggaaaggcttggcttaactaggagagggaatgccagggagaaatctgtatttcccactatttttttttctttttttgaggcacagtttcactctgtcgcccaggctggagtacagtggtgcaatctcagctcactgcaacctccgcctcctgggttcaagcgattctcatgcctcagtctcccgagtagctgggattacaggcgtgtgccagcacacccagctaatttttgtattattagtatagatggggttttatcatgttggccaggccggtctcaaactcctggcctcaggtgatctgcccaccttggcttcccaaagtgctgggattacaggcatgaaccaccacacctggccatttcccactattttgttgataaagacatttggatttccctgcattaggcagatgtggaagaagatggaagcgatgaaaaccttcttgccaaaatctcccaaaagacctggccagtgggtgagcagatctcagttacaaaaagcctataggttgaattttctaagaaaaggcctggggaggaggtaccaggagtccaaattgaagttcgattttcattatcacagattttcatatctctctatctccctttttttgtttttggtgagacagagttcaagaccagcctggtcaacatggtgaaaccccgtctttactaaaaatacaaaaaattagccagccgtagaggcgggtgcctgtcatcccagctactcgggaggctgaggcaggaaagtcacttgaacccaggagatggaggttgcagtgagccgagatcatgccattgcactccagcctgggcgacaagagccaaactccatttcaaaaaaaaaaagaaagaaaaagaaaaaagaaaaaaagaaaatgcactttttgctgtcagtaaaagttaagcaaaagtcttgctgagagactgatatttaaataactattataatgcaatgtaaaattactgcaagagatatgaacacagtgctcaggaagcttagaggaaggagaaaccaagtccttagtgatggaaggtgggctgtcaaggaaggctttgtggaggttgtgtaattgtaggatgagggccatgtagtaggtcgacggggccctcgtgtgccaggtggaaggaagccatttaagtcttttaagctgagtggtggcatgattacaagtgcactttagaaaaatctctatggcagcaatgtggaggatgaagtaacaaaaatatacactttggttcattttgttctaaatggcaactttacctttaactgtgtacagagcttactgactatactcaagcaacaaaatgcacacttggaaatcctgtgtcacgtgcctatactagctttgtcgctgattcagcatatacacatcctccagtgtgacaggattgtgtatggaaacaggtaagactggtgaatactaggctgtgttcaagtgtagagtctcatgattatcaccaatactgtgggctctccctcttttagatgagtttttctaccatatctttggctttacaaaatatattaacacagtttcataatagatctcttggaatatggtcgtttggtgttaagcattctatctggcaaaatgaaaaataagatggtaagagttatcctacaaaaatcctaatgttctcaagctactgctgaaattctttttctagtaatttacaaaaaagtccccattttcttgtagaaataagccaattaaaaaaagaaaaaaattaaaataaaaaattaaagttcttaatgataaattatattaaaatttatttcctgttttaccctatatcctatgagcgtggttctcaaacttcgttcagtgcataccagaatcatcatgtgcgcttgttaaacagaggtctgggttccacccccagagcttctgattcacttcatggaatctgagaactggcatttctgacaagttcccaggggatgctgaggctgctggtccagggaccacacactgagaaatattgttctgaaataataacagctaatttttgttaggcagtttctgtgttccaaatacaggttgaatatcccttatccaaaatgcttggggcaagctgggtgcagaggcttattcctgtaatgtcagcactctgggaggctgaggcaggaggattgcttgagaccaggagattaggaccaacctaggcaacatagcaagacactgtttctacacacacacacacacacacacacagacacacacacacacacacacacacaaattgccaggcatggtggcatatccctatagtcccagctacttgggaggctgagggaggaggatcacttgaaacaaggagtttgagactatcctgggccacatagtgagaccctgtctctacaaaaaatatttgaaaaattggccaggtgcggtggctcatgcctatagtcccagcactttgggaggctgaggcaggtggatcatttgaagtcaggagttcaagaccagcctggccaacatggtgaaaccccgtctctactaaaaacacaaaaattagctgggcagtagtggtgggcgcttgtaatcccagctactcaggaggctgaggccagagaatcgcttgaacccaagaggtggaggttgtagtgagctgagatcgtgctcctgcactccagtctgggtgacagagtgagaccctgtctcgaacaaaacaaaacaaaacaaaaccaaaaaaaccaaaacaaaaaacatattagcttggcatggtggtgcattcctgtagtttcatatacttgggaggctgaggcagaagaattgctcacgcctgggccttcaaggttagaatgagctgtgatctcactactgcactccaatgtgggtcacagagcaggactcaaatgaaaacaaaaccaaaaccaaaattcttgggaccagaagtatttcagatttcagattattttggattttgaaatattggcatgtatctaatgagacatctcagggatgggacccaagcctaaacacaaaattcatttatttttcatatacaccttgtatacatagcctgaaggtaattttatataatattttaaataattttgtgcacctgtcacgtgaggtcaggtgtggaattttctactgtggtgtcaagtcaatgctcaaaaaattgcagattttggagaatttcagatttcagatgtttggattaaatgtgcttagcctggaccttacttgttgtagctcgtttaatcctcatggcaatgctaggacacaggtggttttagtataatattattacaaatgaagagcctgagacttgagaaagtaagacaacacactccaggtcactcagccaattagtggtgagcaagaattgaacccagatttgatatgcgaatgacttgctgtgattctcctattggtgattttttttttttttttttttttttttgagacagggtcttgctctgtcacccaggctggagtgcagtggcatgatctcagctcactgcagcctctgcctcccaggttcaagcgattctcctgcctcagcctcctgagcaactgggactacaggcatgtgctaccatgcttggctaatttttgtatttttagtagagatggggtttcaccatgttggccatgtggatctcgagctcctgacctcaagtgatccatccgcctcggcctcccaaaatgttgggattataggcgtgagccactgcacccggccccttattggtgtatttttatttcccaagtatgacacctgttcagagactttggaaccctgagaacattttgttggtgtgttttgtgactaatattgcctttttctgagatgaatgctgttctttgaaaaaacatttgtatttttagatagaaatgtacttcatccccagtgaatatttctgactttagagaaattgccaaacctgctgactcataacaaaaataaagagcatctactattcagtttatggcttttagttttgggaggtggtaggaggaaggatagattaccacccactatagatcattttattttcattttattttaatgccatttaccagtattgtgtatatggaggtggtcttgagagctttgtggagattattttttcaatagtacagatggctctgataaatatttaaggcatcttgggaaacaagaataccatcctgactcaggagaaattggtcacgtaaatcactttgtttcaagtgctttggcctctgagcatctcaaatggacacatacttcattggcttattaactcattgccggagtcactgaaggcccaaactacaacttcatgcctgaccacacaccaaggcttttttattgcttagttttctggctctttgcctattctgctctccctacccataaccatgtgagtatcatgtccagcaaactaacttactccttctctctccccactacacacacacacacacacacacacacacacacacaccacactccacacgcacacatacacagagcatttttcatgggtatgttgtcagacagatttctctgttctgaaggctcatctccttagagaaccttaccgtgtcaatgttgcatttagtttagtttagtgttgttgttgttgttgttgttgttgctgtttttaaatcttgctctgttgcccacagtggcgcgatttcagctcactgcaacctctgccttttgggttcaagcaattctcctgccgcagcctgctgagtagctgggattacaggcccccgccaccatgtccagctagtttttgtatttttagtagagacggggtttcaccatgttggctggtcaagtcttgacttcctgacctcgtgatccacctggcttggcttcccaaagtgttgggattacaggtgtgagccactgcgaccggctgttttttttttttttttttttttttttttcttttttgagacggaatttcgctcttgttgcccaggctggagtgcaatggtacaatcttggctcattgcaacttctgcctcctgggttcaagcaattctcctgcttcagcctcccaggtagctgagattgcaggtgcccaccaccatgcctggctaatttttgtattttagtagagatgggatttcaccatgttggtgttgtatttagttttaacactgttatcttctcagattgtaatgagagaacaggctatcatcacttggtgataaaatttcctgtaattataatctcattctcaaagataaaacattgatacctaatgtgcttttaactttaatgccaatttatcacaatggaagacatttcaaataaatactgtttttttgttcataaggtcttaaaaatcttgaatataactgcaaaaaagcattacatgttaaaagaaatcacaaaattagttaagaaaggagccaaactgaaagaagattatatttctatgcccttgaatctttacaaaatttagtaaaaactattaatatagaattatttacaagagacttctctatttaccagcccaatatcttcacatttctacaatctaaggggaggtgattgtggccagaaaagtttctgggctctggtattgcagttttcctgcacttaccaccatccggcatgttatatattttacttatttttcttgcttattgctgtctctttccacaagttccatgagcagagacagtttatctgtgttttttacggctattctcaatgtctgtaacagtgtctaacgtactatagtcattaaagaaatgctggttgggtgaattcagaaataaattagtaaataggtgaagcatgttggtttaatattcatcatcagaacttaaaaacagtttaaagaacctcaactgagttttgtacaataagtagtgacaaggtgggacagaggtaatttctttgtatctctgaggctttccatttcatgaggaacatagaataatatgtgtttccaaatgcagtgttcaatatctgaagagtatatatcatcagtatagaaaatagacaacacatgttaaagggaatgtaaaaattctagatgatttttaaggtatgtatggtttaatcaattgtttatatgctattctcttctcttaaaatgaaataatgcgaatgaaaaaataaaccttacaggtagtttctgggaaattcagacaacaaaattgtctaacatacgccaaaaacaatatagcatttaatgatgacatggattccgaaagacaaatcactgctcatcatattacaaggaatccaaacaactgaggggttatcatttatctatagttgcataacaaattaccctaaaatttagcagcttaaaacaacaatttattatttcataaatttctggggatgaggaatccagaagcagattcactgggtggttctggctcaaagtatcttatttgtttgctagggctgctgtcacagaacacaacagcacaggtgccttaaataacagaaacatgcattctggaggccagaagtccaagaccaaggtttcctctgaggtctccgtccttggattgcagatgcttgtcctcttgctccctcttcacatggttgtccctctgtgcacatgcacttctgtgtctctttttgagtgaaaatttataagcattccagtcagattaattttttttttttttttttgagatggagtctcactctgacacccaggctggagtgcagtggtgcaatcttggctcactgcagcctccacctccctggctcaagttcttctcctgcctcagcctcccaagtagctgggattacaggcatacaccaccacgcctggctaatttttgtatttttagtagagacgtggttttgtcatgttgcccaggctggtctcgaactcctggcctcaagttatccacctgccttgtcctcccaaaatgttgggattacaggtgtaagccattgcaccctgccccagtcagataaaattttaatctcactttaacttaatcacttctttgaaggccctgtctccaaatatagtcacatgaattagggccaagctgtatggcttcatttaaccttaattacttctttagaggctctatctgcaaatgcctccacattctgaggtggtgggggggttaggatgtcaacatatgaatttgagggggcacaatttagcccatagacacctgtcatgaggttgtagtcagctgtcagttggggctgcaatctcatctgatggattaactggggaaagatgggcttcccagctcactggtgtagttgttggcaggcctcagtttcttctcgctggagacttcagttcttgccatcggcttctccacaggttgtccagattacctaatgacatagcagctggcttccccaaaagcatggaatgggggttggggatgggataagagagagagaatccaagacagaatgcacagtcttcttataacttaggtttagaaataatatatcagtacctctgccacattctgttggtcacacacactaaccctggtaaaacatgggagtgaaccatacagggggaactggggtcattggtggtcatctttgaggctggctatggtaattaggtaaaaataaaaattcagtctgcagaaacgtatgtacttatgttacttaaaatattttaaccaattagtgaaaaatgactttgaagtatttttagctgctataataattgagtaggaattattttttcttggattgagttatatttactataaaaatacttactttttttgtcaaacacatttataagtgctgcaaatattagtgaccaatggtctattgctctaaataaaaagcaccaggagttagtatagtagttgactccagcctctggtgctagactgcctgggtttgaatatttacttttgcacttacaacttgtaacaacttgaacaatttattcaatctctctgttccctagttttctcatatgtcaaatgggagaaacaaataacatctgcttcatatggctgttatgaaggctaagtaggtttatatatatgtatgtatgtatgtatgtatgtgtgtgtgtgcatatatatatatatatatatagagagagagagagagagagagagaaagagaacttagaatagggcctggcacagagaatatgataaaagaatattatttgtttcctctttttatcatccagaacatggtgtaatgcccaatacattgtagatactcaataaatgtttttgtatgatccctaaacattgtctgtaaggaatttacaatggagtttacagtaaaaggtggtacatggtaggtaccatggaagcattacaaacagatgaccatgtgaatctgaaagaagcacagattgatttcttcgtcataaaacatggttgtatttgagctaaagcttagaactaatgaagattattgccaggcgtggtggctcacgcctgtaatcccagcactttgggaggccgaggtgggaggatcacaaggtcagaagatcgagaccatcctggctaacatggtgaaaccccgtctctactaaaaatacaaaaaattagctgggtgtggtggcgggcgcctgtagtcccagctactcaggaggctgaggcagaatggtgtgaacccaggaggtggagcttgcagtgagccgagatcgcgccactgcacttcagcctgggcgagaatgcaagagtctgcctcaaaaaaaaaaaaaaaaaaagagtatcaatgtatcaaaatcattattttaggctgggcatggtggctcacatgtgtaatcccagcactttgggaggctgaggtgagagatcacttgagcccaggagttcaaggccagcctgggcaaaatggtgagaccctgtctctacaaagaaaaaaaaaagattattattccccaaataggaaataacataagcaaacgtcccctatttcccccacgatggagctggagcatggtgtatgagaaggagagtcagagggagcaagaatgaaggggtcaggttggtaccaggtaatgaaatcattttaacataagactacatgatttggacttcattgtgtggtcacttcggagcattttagcaacaaaataatgtcttaggaagattaatctggtccaattgtaaagtaaattgagattcaggcttcaggcttggcttgatccaggattcaaataaaatcaccaagaatctgtatttcagatctgctttttttgtgtggctctgcctgtggctccataagaagcacagaaaaaagagaaatggtctgttaaacagaaaaagtgaaaaagcttcactcccagaaaatatcttcttgcatctcatcggcctgagttcactcatgttcgtattcttcaacaaattatcatgtccaggatatgaaacggctgcttggatccaggcacactgataacgctgataccacacctagaaaaagaaatgaatttcattcaaattccattctactattttaaggtttcatgtctagatggctggagattaagtgttgcagtccaggcgtggtggcccacgcctgtaatcccagcactttgggaggccgaggtggacagctcacttgaggacaggagtttgagaccagcctggccaacatgatgaaaccccatctctactaaaaatacaaaaaatagccaggcttggtggtgcgtgcctgtaattccagctactcgggaggctgaggcaggagaatcacttgaatccaggaagtggaggttgcggtgagccaagatggcactactgcagtccagtctgggtgacagagacttcatctcaaaaaaaaaaaaaaaaagtaagttttgcaattaggagacatgcctataatgtttatttagtggtgatacgtatggtttagtcctttaattatagtgtggtttaaatgcaaatttaaagtaactcaaatacagctattttttctcacatcatagggagactataaagtccctcagtaatcattcttcaaatagatatttttcttctttcatctactgccttcacgactgcagtcactttctccaacagtcttttctccaaataaaaacaaaaacaccactaccaccactaccaaaaatctcaagtacctgctatctctgatctttctcatctgctaatattctcttcctcccttactcccctcctcttttcttcctttcctccttccccatctctccatctcacacctccctctcttcctacctccctttctttcaaccttttccccttctattcttccttccctcgcttcctccttcccttccttccttccttccttccttccttccttccttccttccttccttcctttttgctattaaaaattcctcaaactggctgggtgtggtggctcatgcctgtaatcctagcactttgggatgccgaggtgggtggatcacttgaggtcaggagtttgataccagcctggccaacatggtgaaaacccgtctctactaaaaatacaaaaattagtagtgtatggtggcaccgcacctgtagtcccagctactcagaagggtgaggtgggcgaatcacttgaacccaggaggcagaggttgtagtgagccgagatcgttccactgcattccggcctgggtgacagagtgagtgagactgtctcaaaataacaacaacaacaaaaacaaactggcaatgcaggacttccttgaaagacagaggaaaggaaaagattaagagaagttataccaaaactctttttaataggtaggcagggaaaaaattgggaacctttatacatcaataattttattctcataatacttggaaatcatgactagctgttgctcttcttcaacatctaactattatcatttccacatctgattcaagcacttcctttttacatgtcttttttttttctttgcctgaaatattatttccttccatcaaattaacctttctgcccacctggcaaccctctcttcttcaagccttactcatcaagaagccttccctagcaacagggaaggctctgctaccaatcccacctttatgctctctggactaccactttgtcttgtacatttctattaaattgtaacttttcatttttgttacacatctattgactctactgctcagtgaactatttgagaccaggacaccattttgcatacctagcacaatacctaccacatagtagacatttcataaatccttattgattgaataaatcaatgatgaataacatttttataaatttcattttgtatttgagttgaagctccaagtattacaccctgttagagattttaaacttgatttttaaaatattggactagagcttaaaagaagattatattagtcaggggtctcaagagaaacagaatcaataaagtatacatttattatataattcattataagaaattggctcacatgattgtggaggctgacaagtctcaatacctacagtcggcaagctagagacccaggagaacctatggtgtagtccaggctcattccaaaggcctaagaaccaagcgagccaatgatgtagttctagtgtgaaaacctgcaggctctagacacaggaagaagccaatgtttcagttaaagtccaagggcaggaaacaccaaggtcccagctcaaacatagtgagacagaaggaattctctcttactcagccttttgttctattcaggctttcaacagattggatgaggcccacccacaatctgctttacccagtctactgatttagatgttaatctcatccagaaacaccctcacagacacacctagaataatgtttgaccaaatgtctgggcaccctgttacccagtcaagtggatgcataaaattaaacaccataaagactaaagcctgtagatgaatatctggtaacacctcacagaggagagacctaaagctgtgataacgtctctgaagccaagagagaaaggctagaaaaagcaagatctgggatatttccttagaatccttgcctgaaggccaagaagatgaggaagttaattttctcatccagagtggtggtatcgagctagaaaattgtgaagatctttctagttctaaaacatctgttacctccttaccttggggtttcaagactgggtaaatggaaatactaagataattggatgatgtaagaagattttggatgggaacaatatcttgttatgcaccagttgtatggaaactacttatttataagatttaaaattctacgtatattccttcaggaaatgttgtcggctttctacaagatgcagctttaattgtattattgggaaccatcattgattattaggttctttggagaaatttctttccttcaattagaagcacccatgaaggatatgaagaagagttggtcaaagaactataagaagatcatagaatgtactgcactatagaagccaaaggaagaggtaaatcaagaggcaagaaatgatggaaaggtattttgctatagagaggtaaaggttgataagacttgggaaaaaggccatcggattttacgattaggatattaaggacaagtttcagccaagtcatgagaaactgagcatcagttaggtccctgttgtttgatattatgacaatgtggtggatttagtaattagagtctttcaaaattgtctgttagtgctttgcagcttgggggcatgagcagagaaggtagggggcaggaggaatggggagcatgtctgtggctgagagttgaaggcttgaatggtaagagtaggcttgaggattgtggcttgttagaaaagacagcattaaaatatctgaacatgggactttgtttttagaaaggatacaaatgaagttaaaagccagaagaaggtcttgggtgggattttcaagctgcattccttggagtcttgaatcgtggattagagaaaagaccaccctgtgttgatctcagtagcttctcctgttaaacatcacagcacatgtgctttgaccagttttgtatattaaggctctatgtggctatcttctgtcccgctctgtcccccacggccattctctttccttcaccatgctgctctatgacccgggaggctgacctatatggaccatatcagtgggctgctttgccctcctgcttctgtttggattttgcccttggggagcacttgcatgagcttgcagggagggagaatgagaggcaaggtataatctgctgtgacctacagggtcatcaggatcctttccccttcaggcctagagttggtaataatgcccagctttcttaggcccttgaaatttctctataccctgctatatctgttcaattgcctacataacttaaccagtgtatgcttactactcactgcagccttgatctccctggcttaggtgatccttccacctcagcctcttgagtagctgggactacaggtgtgcaccaccatgcctggttaattttttgtattttttttgtagagacagggtctcaccattttgcccaggctggtcttgaactcctgggctcaagcaatcctcccaccttggccccccaaaatgctgagattacagacaagagccaccactcccggcccaaacattttttttttttgtaaaaagccaggcagtaaatatttttgatctgtgagttatacaatctgtgttaccaccacttaactctgctatctcagtgagaaaacagccatagatgttaagtaagtgaatgaatgtagctgtgtttcaataaaactttatttacaaaaacaggcagtgagctttgcttttggcccataggctataattgaaagacccatgatctaggacaagaagttttccatctactctatgagagtggttctcaatctgggataatttagctccctaagggacatttgttaatttaagacatttttggttgtcacaactggaggagtagtgctactggcatctagtggataaaatccagggatactgctaaacatactgcaatgcacaagacagcccccacaacaaaaattaccctgcccaaaatatcaatagtgctgaggttgagaaatgctggtcttgaagatgttaaaaagattgtcagtttgttcatcatatcgctgtggcttggcgaaaagaatcacagagttaattttataactatgaaggattgttaggagctgagtttttttctagttcttattttttaattattttatgatacttttcataaaaagtggtgtaagttgtgtttattcagaaatgtgattttttttttttttttttgatggagtttcgctcttgtttccgaggctggagtgcaatggcgggatcttggctcactgcaacctccgcctcccgggttcaagcgattctcctgcctcagcctcctgagtagctgggactactggccaccatgcctggctaatttctgtatttttagtagagatggggtttcaccatgttggccaggctggtcttcaactcccgaactcagatgatccacctgcctcggccttccaaagtgctgggattacaggtgtgagtcactgctcccagcccagaaattgatggtttctttagcaattttgtcacccatcaagtcgttagtcatattaatcctccataacttagtctttttgccccctgattatcttttgggtgggcagtgaaagtattcatacctcttttagcaaaacctatctcttcttggatttcctttgcttgctgattaagaggaaggactatctgtgaaagactcagatgtggctcaatggaatgaatgtgagaatggtatgagtgtgggtggtgggtgctgtgggggtcggagatgagtggctgaaccatccaaaaataagaatactgacaagcgtgttttcttgtgtgtgtgtgcgtgttgtgggaggagtgtaactgatgtggctagacaggattaacgaaagtctcaggagttgagagagactggggacattttaccaatggcgagaaggaggaaggatgacagctgggaaaattagtgattggaaaaggtaggctgggcagtgtggccatgagctagtccttttcattatattcttctggggctctatgtttaaaactagatactttaacatttcagaatgagaaagagaggaaaggatggtaactgatatgggctattatactgtgaattttaaaggagcctatatattatcctaaaactattgaacctgagcagaactgcaacgttggtattcttgaactgaactgatatttcctttgactaatgtccttgttcaatgaccagagaccatgacactccccaccttcacccccacacattgtttgtttgtgtccagtttgaagaacaatgacacatggaggtcagtgtttggatgatgtcataattttgatcagctggaaagcctggagtggccttgaagagatgcttaacttttggaaatcacttctttattgcaaccaaagctattaagtttaaaggtccataaagatgagataaacagtcataaaggccttttgaaattcatacttagtgtgttaaatggatttaattgctgttagttaaatgtggtgatgttaaagcaatgtctatacactggcaaaaatcagatcatcaactgcttaatgagggacacgtcttgagaaaaacagtggaagaaatgctgcttatatgtaatttgtgattaatttttgcaaggttttcaagggaataacttggccttaaaatattacagtgaaaaacagctttatacttgggtccaatcttcttaaaattagagttcatttttgctattagacaccttttattacaggataactttttcttcccccttggagacagagtcttgctctgttgcccaggccagaatgcagtggcgtgatctcggttcactgtaaccaccgcctcccaggttcaagtgattcttgtgtctcagcctcctgagtagctgggattacagtgcctgccaccatacctggctaattttttgtattttagtagagacagggtttcatcatgttgctcaggctggtctgaaactcctgagctcaggcaatccacccgccttggcttcccaatgtgctaggattacagatgtgagccactgagcccagccagttataggatagcttctaaacttacaatccttgaaatatcattttaggataattctgatcctgcataccagtgaaataagtataattgaaatattaaaccaaatttggcttcaacattaaaccaaaattaaaccaaattaagccagtatgttaaatacatagtttaatcttaattctagttaatatttttcatttcctatgtgtcaggcaatatactaaacaacttacatgtattactattttaattctcctggtaaactggaggggtgtgcaattattgtcatctccattttatagatgaagaaaactgagtcataaagaggttatgtacttggctgaaagtcacacagtcagtgatactgttggaatttgcacccagacaatttaattttagagcctattttcaaccactctctgagactgctttccttttctgtacttttgatgataaatgtgaaaagataattttgagggcattatggtgtattggatcttaaaaacccaggtaataagtcccatctatagtacaaataagctgcgtgatcttagggaaatcacataactgcttctgtaaaatgagagattacattaagttatttccaaaatgtcttttcgacttcaatgtggtgattccatagtaatgtataggtttttaaaaaaccatatccttcaatcaaatggtcatcctttagcattaagttgtttggaatagatactccccaaattcacagaataattttccagcctctctttttgctttgacacctttcttattttttttttttttcttcgagatagggtctcactcagtcgctcgggctggagttcaatggcacgatcttggctcactgcaacctctgcctcccgggtttaagcaattcttgtgccttagcctcctgagtagctgggctacaggcgtccgtcaccacactcagctaattttttttaatagagatggggtttcaccatgttggtcaggctggtctcgaactcttgacctcaggtgattcctcggccctagcctcccaaaatgctgggattacaggcgtgagccaccgtgcccgctattgaccccatttgttgatgcttagggatgaaagtggaaactccactgctaaaacagagaatattacttgagtcattcctctgtcatatatgggatgtttgccagcatggaacattcacagaaattataactgtaaaggccctagcaatgatttaatgccgtctcttcacattatagttggggaagctcaaactgtgacagggtcagggacaggtaaaattcacaaagttggtttacagcagaactgtgctacagttatctggattcagatccaagtcccctccaaatgaatcacaaccacttctacctttataattccaggccatgaaagatcactgttttagtctgcgtggtgcagtggaacagatagacctcggtttgaatctcagctctactgtttactagacatgaaatggggaaatctaaaatgagtaagtatacacagaaacacacattacatacatatatgtaatgttcaggatcattacactgaactttagggcttagtactaatgtacaatcaaggttgtgttagtactgagcagtatatcttttattgttgaagtccaataagaacagagcagatatcaacctaatttgtaagtgatgcattttcctaaactaaatgcccaataatggaatgggctagaatattgcaggacagggctgtgaatggaggaaagcagttggaaaatcaatccttttaaaggcacaaaaggatgaatgaaccacattcccaagaacctgctcccacccactgctgttcccacccccgctgtagttggtagcatgttcacaaggaaggagctggctagctttcatgggagccacatcatccatcaaatcacattagtgttgttgatttgaatgttgtttcctttgtaggtctgcttgctttgactttgtaaaattgtttagtcttgccattattatataaggactataatcataaggcatttatatttcattttgtattatgtatttaagcaaaattaagttaaaaattagacagagatatataggatgatttttccttcaagagttattcatttatttccttttggatatgaaaaacgcttatgcagtcctgtatgtggtctctctctctttttatttttatttatttattttttgagatggagtcttgctctgttgcgcaggctggagtgcaggggtgctatctcggctcactgaaacctctgcctcctgggtttaaatgattctcctgcttcagcctcctgagtagcttggattacaggtgccagccaccatgtccggctaatttttttgtatttttagtagagacggggtttcaccatgttggccaggctggtcttgatcctgacctcaagtgatccgcttgcctcagcctcccaaaatgctgggattacaggcatgagccattgtgcctggcctgtggtctctttttaaatgtttgagattttctctgaccatcacatgatggcagccgcaagttgtaaatatattaaatgagataataccaaatggcataagaccactgtgaattcagtgatgttccaaaataacttgtattttattcatcacacaggcatttatataaattaaaaaataatagcacctgaaaacatgaaaataattgtattcaaggttatttactgcagcatgatttttaagagaaaagactggaaacaacccaaatgtccactaatcgagactgtgtgaacccaagatgttatagctgcatcacacagctgagagaaggaataagatctatttctactcactgccagtggtaatctccaggaagcgctgttaagtgaaagagcaaactagagaaaatgtgaatagtggttaccatttacccaagaagtctatgtgtggtgtgtgtgtgtgtgtgtgtgtgtgtgtgtgtgtgtgtgtgtatgtgtgatttctagagggacagaggaaaaaggtgaagacaaggataggagcgagacttctctgggtacatcttttttttttttttttttttttttgagacaaagtctcattttgttacccaggctggagtgcagtcgcttgatctcagcttactgcaacctctgcctccggggttcaagtgactctcttgcctcagcctctcgagttgctgggattacaggtgcccaccaccacgcccggctaatttttgtatttttagtggagactgggtttcaccatgttggccaggctggtctcctgaccttaagtgatccacctaccatggcctcccaaagtgctgggattataggtgtgaactaccatgcctgcctgtctggatctctttttagtacatttgactttgaagccaagttagtattttccataattaagaaaaaaatagaataaaaaaggaacaatttctaaaaaggaagtcaaaagaaacacattaaactaactgtaagttgagttggtagcataaccacacagacagaaattatttcaagtgactttaacacatactgatgtgactgtgcatccctatcgagatagaaataaaggtaaatataaataaaggtaaaaataagcaagatataaataaagttaaaatgaactgcaacaatcctgaatagttttcaataattatatcataaatagtaattttggtattgttattttaaaacagttatatttataatacatatgttaatgtaatcatgtttatgcttatcataacatatggatgcacagctattaggataatgtataaacatgattatgttaatgccattagggaccaagatttcagagaaaaacaaagaaaaatataaaattaaagaagccagtaaaaatgttatcttaaatttaaactggaaacctcagtataaactcataatgtgttttcttttaaaaaattattttcaaattcagtctcctgaatagaactcgcaacaattaccaagccagtagcaacgacaataaacagccctagtgcccagatggtgctctccaaatgccattttccactaaaaggaatgagggctccttggagaattggatgttttcagatacagagcagaacacatacaaaaagttcctggaacatttgtcatactgaaaagcagatacactatgaaagactatagtaattgtatcaaaagaactcaggagccaccatgaagaggcccccagtgtccagaaatggaataatgtgaacattaagaataataaatcttaatttgtcaagatacaaatttaatcatatcgtagatactcatagcagcattatttaaaataatgaaatattagacacaacttaaatattcaaaactagcagtgtgcccttatatatagaaatgtcatttaaaccttgtagaagagaagtttatgatttaggaagatgtttacaatatgctgtaaaacacacacaacaagtcataaaatattatgcatgcagtatattccagtttattttaaatgatctaggtataaatatccataaaaagaaaactgaatgaataaatggtgaaatgtgaatagttgctatatctgtgtggcaggattacaggtggttgtattctagtttctctttatgttccaatcttctacagttagcatgtataattttatatttttttaatacaaaatatgttatttaactagtatttactaaacaaaaaattaaaaattaatatattttataaaaacaaaagcatatgaatagaaaagtacattattttttaggttatagacaatgcttgtacctgtgtttagggatttgatcctccaggtaggaaactacagatctaatttaacttatttaattaattaattaattaattaatttatttatttatttactttgagacagagtctcgctctgtcaccaggctggagtgcagtggtgtgatctcggctcactgcaacctccacctcctgggttcaagtgattctcctgcctcagcctcctgagcagctgggactacaggcatgtgccaccatgcccagctaatgtttgtatttttagtagagacggggtttcaccacgttggccaggatagtctcaatctcttgaccttggaatccacccacctcaccctcccaaagtgctaggattacaggcgggagccactgtgcctggcctaatttaaaaaatttttaagtcaccaaaaagcaaagtgacatgctcaagtccattattgccaagcaaagaaaaaaatgtcaaaagtacaaaatgtggttatgttttaaaaattagattattattattaagataggatctggctctgttgcccagacgggagtgcagtggtgtactcatggctcactgaagccttgacttcttgggctcaaatgatcctttcacctcagcctcctgagtagccgggactataaggcaggcaccaccatgcctggctaattaaaaaaagaattttttttttgtagcaatgaggtctcactatgttgtccaggctgatcttgaatgcctggactcaagtgatcctcctacctcagcctctcaaagtgctggcattacagtcctgaaccaccatacctagccagatttctattactttgacatggtcctggatacttcatctatgtgtgcaaaatttcgtacttatctcttaaatctggagaaaaatggccaaatttggtatagttgaatttatcatggggtgattaataagtgactaaagattgaccttcaaggatctgaagatctgaccagtgtagatttatagtaattatagtaattacatggtacctccaggtattttctatacattgccgtagttagctatgaaaggatgtaaagaataaaggcaattgactattttaaagaaattaacctcagaaggagattcttcacctaaatgtccctgcaaatattattgctttatgctctgagttagctgaaaatgagtttactatgcctggtgtaaacacttgcaccacccacctgtgtcaaagaacttttcactaactgcatcatgactgattgacgtcagtctacttggcaaccaagtgagccacttagaagaaggctccccttatgaggttaatttctttaaaatggtgaattgcccttattccttatgtcttttcataactgattacacaaatgtatagaaaatacctcttgagatacaatacaatctgtaactagtcatcagagaataacacgttattgtaacacagatttagcttggccataaagggcatatttacatacacattgaaaacaactttaataaaatgaaaaacatatatccttggattcttagcaatttaacagcaatgctctcaggggatcaagctactatttattgactccccctgtgtgccttacacgtaattactgaccctcacaacatccctgggagttagtgtcttacaggagacctttgacatttgtgagaggacatcgtgaatattttccaagtcctcaatccaaaagtgtggacatagctgttggttttcctgaattgtatttctttcaagaatcaaatgttgcttgtgaatattctcatgtaagattaaaaaaaatcttttcctgactcttagaactttagttttatctctgctttgagagccactttaataagcaaactaaaatcactctacagaaaggctgtacagcaaatgagtagagaacaaaagctggctaaactgggcagtcagctaagatcactcagtgtctgagaatttgttctagaaaatcaccctccgagaatcatgcagattgtgcttaggcttccttcatatattcatactctcctcgggtgaacataaattggcacatttataaggaaattttattattatatactcaaatatttttaaacatataaatagtttgtcttgttaattctacctcttggaatctatcctaaggaaaataatcataagatatctgcaaagaattatttgaatgttgataataattttatctataacaataaaaatttgcaaggtggcagatatcagtttatgtctctgagctccaaatccacccttgtttatcttgctttgtgtgaatggagctggaccctgtggatctttctcttttgcaaatttgggggatattcaactttgtcaattgagggcactggagagaccctgcaatggaatagaggctccaggtgcacctacaggccatctttccctaccagcagcgatttcagagtaacttcagcctgtccataccctccagcaatggtgggtcacttctatagatgaactctggcccacccgcagcaccaagcaaaggaaggtcactcctgtacaccagcttccaaccactctcatccaccagtgatgatagattgcttttatggatcaatgccagcctttgcactcagtcgtttctttgttcctgcaggctgcctgtggtagttactatctctctgaagaggtctgaatctcagccttggggcaaggagggcttgtcctcatccttagtgcctttactgttcttcttcctcagcctagaaataatagctccttttaaaattcttgatgcctgggcctcttagagtcctcctttatatatcttttagtaggtaatttttggaacattaaattttccctgttcaaataattatcatagtttttgtcttccacttggaccttgaatgatacaaaagttaaaggctcaacaataccagacttgttaaataagtagggagctatccacacactggcataaaattgttttgattatctattattcccttggtgaggtgacccagacccttgtttgaaagcgttttattggctgggtgtggtggttcatgcctgtaatcccagcactttgggaggctgaggtgggcagatcacctgaggtcaggagtttaagaccagcctggccaatgtggtgaaaccccatctctactcaaaagtacaaaaattagctgggtgtggtggcgggtgcctgtaatcccagctactcgggaggctgaggcaggagaatcacttgaacccgggtgtcggaggttgcagggagccgagattgtgccactgcactccagcctgggtgacagagcgagactccatctcaaaaaaaaaaacaaacaaaagaaaaacaacaacaacaacaaaagaaaaaacaaaaatgaaagaaagggttttatttgtcttctctctctctccctgttttttttttttttcttttttttttttttgtctcatctttgctgtaattgctcatttgctagggtcattggacacagagataccaagatgtcttcagaaatcatgaatattccccaagtcctctatcaaaaagtgtggacagagctgtcggttttcctggggtttagacatgttctttcttgcttctgttgtgtagtaaccctagctcctcaaggaaatcgtggtctatgggctctgccaaacagtaattcctttctttgcttgctggctcactggcttgaggaactcaaagtaatcctttggtaatttcagcttccaggtcagtggggacattaatgtgtttcttggtagaaatgtcactctactccaagaaataagatctttaatccagaaaacctgagttttcagggacagaatgcacaaacttttatggtcattcactgggagttctaatgagcaggttcgatcatatttctattctttagttcctcgacccatgcattttagctactgggcggcgaaccatgtatcagctgttagtgctgtgtgtattccatatcatgaaggtaatttcccaggcccacaacgttttcttcccaagctggtgccgtaactgagcctttaccaggctattccatcattttaggtgtttctagggtatagagtaaatgataagaccagtgactcccatgataaatgtgcaccatggtgaacttcctttgctgtaaaatgtcatcttggtcctagtctatatcgtaaggggcaccatactgatagaccaggtactggtgagcccttggatggtggtactggtagaggaactgcaggaagaaaaggtaaatccatactcagaatatgtgttgattctggtaaggacacgttgcttttccctccaagacagatggttccgatagatggttgtgtagctaccctccctgaggaacggtactatgtcaaggtcttggcatcagattccgtggctgacaggttggaaatttagcattgacagtagctgaattatcttttgtaagtgggagctcaaatatgaccatgcatagcaccatagtgattgcagcactagagacactatttatgggctttcctgcacaagaactggggtggctaaagacggcccggctaaaaggcaggatggatcatcctgagcacatggttgttgagagtcttctttgcagtcgggcggtagtgtgagatctgctttgtgtttatttccgtagggttgtccacatacatttttttccccacaccttttctctgagcttcaaatctttttttcttgtcctgtcgaaatggccaagccattcactactgcttagaagccagtgcatacttaaggatctggtcttttcttccatatgaaatgaataactaagtgtgttgctcatagttttccccactgggaggatttccctttacctctcttctttggggccacctcaagtgaggatgaaatgcaacagcagactatctctggctagaggcaataaatcacactagcccaattatgcaccaggcctgagctgtttcctccactactgattgtttgtaggtagcagttgtgggagcttctgtggaacagattcaggtggtacagctgctcaaactcataactcacctgcaatgtgttctgaaaatgtgtggcttaactgcatctaccctaaaagaacaagttggtgagtgatgagatgagtgggaagtagtgaggatgacctggattttccattgaggaagtggccaagtcctgcggacaaattgtacctaggaaaaggtacaaaaacaggagaatggatcatgcgttcagtattggaactgatgactattaagttgctgtgggcatctgaatatagatgttgtgatggttttaaaacatgtctgaaaattctttgacactgtttccatcaagaggtgatgtctttgtctcctccccttgaatctaaatgggcctttgtgacagatctgatgaatagaatgcaggaatgtgatgtccaaggctagtttagaaaagaccatgtttgtttctctggagacacttgctctgggagctattagtgtccttccaccaaagccccccaggaacacccctgcagctaaacaaattggatttattgcttattgtagcaagacagaacattcaccagggggaaccataggttatctcagtaagagggttttagaaagaacctattataagatttgggctttggttgggtgatttgggggaaggtttaaggaatcaggggtggccaggcacggtggctcacgcctgtaatcccagcactttgggaggccgaggcaggtggatcacgagatcaggagatctagaccatcctgactaacacggtgaaaccccgtctctactaaaaattcaaaaaattagccgggcgtggtggcgggtgcctatagtcccagctactcaggaggctgaggcaggagaatggcgtgaacccaggaggcggagcttgcagtgagctgagatcgcgccactgtgctccagcctgggtgacagagcgagactctgtctcaaaaaaaaaaaaaagaaaaaaaaaaaggaatcaggggtttggtctagattgaatgctctcagaaaatgggagtaattctagggttgtatattttataggtggcatagtgaccttgttttgtctgtccttacacaaatgatgaagtaggctgattttgtttcattttatcttggtcgcagagtaactttgtctgaggttggtgttctataagattgtatatgtccaacaagagaatgacatggcttagctgtgaatgtcagatcagttctggatatgagaggctgatattttctttttgagctttcagttgtcatgtaaggagtgtggctaccatgaggccactgcatagagtgattgtatacctatatataagagagatggtttggagttcaagcccccagctagtcaagtcttcccagcccaggagacagatgttcgaatgaaggagacttaggtaatttcagccccagtcactgtctgaccacaactgcatgagagaccctgagggagaactgctttgctgaacccagtcaacctccagatttgtaagtaaaataaatggttatcattgattgaagtcactgttctagggtggtttttcctacagtaatgtcattgatacaggtgtctggcaggcagttggctctagaggtctggagctaaggagaaagatctggcttggagatgtggatcaggaagtccttttacaaggagaaaagtgcttgaagtcatttgagtggatgacatcacctgaaagataatatacattgagaaagaaaaaaataaaaagccaacaatagcacctttagtaacaacactgaagagagcaggaagaaataaagaaacatttgcaaggagacagagaaggagtgaataaggtgatcaaatggcatccatccaagagatgatgtccaggaagccaagaatgagagtatttcagaaagaagagtgttgtccacagagttaaatgctatggagagagatggagtaagacaagattgattagcaccaatgagctttcattgttgacaaatgcagtttgagggaaactgggggctagggagtgatggggcagagaccagaatgcagtggggtaaggaggggtaagaagatgagaagaatgccaaatctgtgctgtttgccacatcatgggccctctctccatactatttatgtgtgtataatttttttctacaatttaataatgcattaaaccatcacatcacatcacatcacaaacccaacaattccacaatagcatgggtagatcataccctggtgtatttttaatgttatactttaaccggtagttttgagtcataaatgtactactatgttgttggttttttttttttttttgggtctgtcattatagtaataactttaaatctcttattgtttatttctcttgcaattaaaatagttcatcatttaaaatagtacccagtgttcagtgtccattggtgccttgtaattacttcagaaaaacagtctcagtttaaaagttataaactcttaatgcctctctgcaggaggaatagcttccttctgccagagcggtctggggagcattattctagtcataccctgctaattcattggcttgattgtcaggggtcctgatctagttcaccctcctgggaggctggtgtgggaccctgcttatcccagtgggggtcaaggcctccttgacaacagtgaatgggttgctaggaggctgcggaaagaaatttctctagttccatccacaagtagatcccactgcagtggcctcatttggctcctctaatcctctctttcccaccttctttcagggcaagtctcaccctattttcttcattacttgcttgtggtttccttgccggagatgcttggaggcaagcattatgacaaggatgggcgcgggtgggagtaaggcctttaaacgaagagctacatttcaaagaacttcaaatgtgtatttcaaatgtcacttccaaatgaggttgtacacacagacagaaacgcaattaacagatttggaagaggccacgtagcatgcatttgaaactcctgttgcattccttggctattcttgtctgtggcatctttttaacaaatcctgtagttaccttgtaaataccatcatagaatatattgtatttaaaaaacattctttactcagatatgaaagttgaaaaggtactattatttttaaaaatctgtattggattttttttttttcatattttaggatgccagaagcctcaaaaatggaaaaccccctgtgcttcacatctgaaaatctctgctgggggcagcaactttgagcctgtggggaaggaactgtccacgtggagtggtctggtgaatgcttaaggagctgcagaagggaaggtagtgaggagacagttaaatattgagcacgttttggtgcctagcattgtactggcctttcacatgctatgtttaatcacgcaggattgtatggaatgggattgtacagaatgaggcctgggtttgctaaatcctgggggagattgtctaagctgtcacttgaagggaaaactgtagcatgtgggacttaaaaacagcttgggatggagtttgaggtagggcgagagggaaaaagatcttggcagatacattctgaacaaatacttgtgtcatcctcaactgtatagtttttatgacttttcctgtgttcatctggttggcagatgaatgcaaaatgccttttagcttcatggaaggcacacatgaatcatggctatgtgataaacagaagaagccacgtttcggagggtttctggtgtgtgtacgtgtgcacttgcatgtgtgtgggcacacccttgtgccaaatggaccaccagtttaaatcgattttcaacagggcagatttcatatgcttctttagtgtggcccaagtcaatctatttttagaaggggaaagtagagcatgttctgaaagttcttttcttctgccatcagggattgtagtactttttatttatagtaatttcaggtctctaaatacttcaagcaaaattaatgaggcaaacaaaaaaaattaggtaccagataattggatcatgtgttattttatagagagctttatttatcttgcctttggaaagtataatttgtatttttcaaaattatgattagatctaattctttttcaagatttacttaaaataaatatttctgcctaggcacaagactgtgtatagcacaactggccttgtattattgacttgatgatgcaaagaaaaatatataagaatcagttttttttaaatgtgttaatatttatcataatggaaatagtcttactaattagcaataactagaaaaatgtctactatttattgagccactactatatgccatattctttacctatgttcattttctcttctatattcaaaataatcctataaggtgtgctttatgatcaccatttgttccaatagggtctcaaggacgttaggtaattattcctatgacattgagcctatgaatggcagagctgggagtttgaacctaagtctgatgactctgaagcttatagtctttctataagcttcttcagtctgaagctgcccctcaaagtcatggcaataactgagaatagcattcagttttacagctaggaaggtagttgtagttgtgtttattattcaatactgtccatattcaaagaaccattcattgagcttctattttactccagtcacggtgataaataatgcagaatctagagatcaaagataaaatggccttgccctcaaggaacccatgagctagttgggaaaactaataggaatattaatgattataatgcagaatgttaggtgcaatgagagaggtaacaaggtactactggggcctgacaaaggccaccgtttctgtgtgtgtgtgtgtttatgtgtgtttgggaaaaggcaaaagacacttgagataaagggaacaacatagacaaaatcaaaggcttgagagcatataacttatatgagacatagcaaattgtttgctttaactagaaaatagtggttatgtgtggcagactatgagaaatgagaatgtaagtccttgagaatgataactttagaaattctacatttgggatgatcataaccttttaaaattgtctcaatatgatagatattttccttctgttttggggtatctgtctttttattttttatttttttgaggtggagtctcactctgtcacctaggctggagtgcaatggcgtgatcttggctcactgcaaccttcacctcctgggttcaagcaattctcctgcctcagcctcctgagtagctgggattacaggcgcctgccaccatgcctggctattttttgtatttttaatagagatggggtttctccatcttggccaggctggtctcgaactcctgacctcagatgatccacctgcctcagcctcccaaagtgctgagattacaggcatgagctaccacgcctggcctggggtgtccatcttttaaagacacactgtaagaatcataatattttcccaaagaagaaatgtaattagtacacaattacatgttaaaactaggtgttattggtaattaaaatttaaaaaaattaacccaaccaaataataaaactaatgaaaatatttaatattggtaagaacaagatgcgataagcatatttgtgttttgctgattggtctataaagtggttcaaaacttttgtaaactatatataagctattttaaatgtttatgccctttgattcaatagcactaggtttggtactttataataggaaagttattagaaatatttactgcagggtttcttcaatgatgagttgtaagaatcagcctaagtagctatggtacatcactttgatgcaacttaatgtgtcattaaaaatcatgtttatgaataacattccagatgcatttaatacaattctagctgaaaaaaagatactgaaacattttgtgtttatatatgtctgcatatgtatctatatatatccctctccctgtcaatctataaattaaaaactatacattaaaaactgcaaattaaaactatatactaaagaaagaaactggaaagaaatccacagaatgttaataatcatggtcattgtgttgagtggtaggactatgggtaattttttctttctatttttatacatttttcactttttttttttttttcaatttgaggcagagtctcactctgtcacccaggctggagtgcagtggaacgatcttggcttactgcagcctctgcctccgggttcaatcaattattctacctcagcctccagagtagctggaattacaggtgcacaccatcacgcccggctaatttttgtatttttggtagagacagggtttcactatgttggtcaggctagtctcaaagtcctcccaaagtgctgggcctccaaaagtgctgggatttggcctcccaaaatgctgggattacaggtgtgagcaccacacccggcccatttttcacatttttaatgatgtttttaactttaaaagtaaaaatttgtaatttaaaatttgtttaacttttacaaataaaaattacaaatgcaaattaaaattgctatatatttttgttactggacaagaaaagatgcattatagagtctcgttttattttgttttctgataaatctattgctggggagcatgtgcgtaattcgttttaaaaattctcagtgttaactagatttcttttgggatagctctgctgaactggaatgagatcttcttccccagagccacttgctagtttgattttctagaaagagagaaattatagaaagctacaatctacaaattgctatgtactacagtctactaaatagtataatactttattttgcaaactatatctctcagagtacaaggctccacagctagtcttgcaccaaatatatgaggttcttgaatagtcattttctcaaagttctcatctctttacaaagcaagttgaggggggaagcagagagagcactctggtgcttccaaaagcatcagccatccacactctgcctattgaaaacaccaaatctgagcatgtgtgtcattgtccaggaataaacaatcacaaaaaggcatcaatgaggcctataaaaacaagagcgcatgcaagaagatgggattgttatgaaacaggagcacaaggctactaaaagagggcaagcctaaaggaaaagtcaccagggtgagatggaaatagatataggaagaatagtgaacggtggcaaggaagtaaaggaatacaaaagtaataaaatatccattgcattagtccgtccttgcattgctgtaaagaaatacctgagactggataatttataaagaaaagggtttatttggtttatggttctgcaggctgtatgagaagcatggtgccagcatctgctcctggtgaggcctcaggaagcttctattcatggaggaaggtgaagggggagctagcatatcacatggtgagagatggagtgagagagagagagaaagagagagaggagatgccagtcttttaaataaccagatcttatgtgaactcagagtaagaactcacttatcatgaggacagcatcaagacattcatgaggaatctgaccccatgacccaaacacctcccactaggcccacctccaacatgggcagtcacatttcaacataagacttggagaggacagaacatccaaaccatatcacccacattgagggagcaaggagcagactccatactgcagaacacacatgggaaacaaacttgagaagtttccccagggcatagggtaagaggacgaggggctggaaaaagaaaggtaatggatatagaggacagagaatggagttcgaagatacatctaagaactttacatattcctaaggaacccacaaagataaaacaaacagagcaagtatgaaagatgtaatagaagcaaatgaccctgcattgaaaatgatcaaagtatgcagattggaaaggctcacaaattccaataaaaagaattgaaaacaaaaaaaaatgctgcaataacattctttaaactatattaattgtaaggtttttacaaaaataagtactcaggcagtagtaaaaagtttgcgaataaagaaaccaaaattaaactctaacttttcttatgtaataccaaattccagaacttggaaacatatctgcatgctttaccagggaccagattatgaggcagttatttaagattagaaaagttctctttcattggtaaaggcaacagaaagatatattttagaggtagaagctctctaacatagacactattctgccaaaaaaaaaaaataagataaatgtaacaaaataaaatgagcttcaaggtgtattttggtcactgagagatgattcaaaagaagactttgaacaatgagaatgttaacatttaaaagaataggtggaatttttccttactcagtttgttcaataaaatcatgggtccactgtaacctgatatatcttgttgcttaaagggaaagcttggccctaccttttctgctttcttctgtgttcatggtgtagaaaatgtatttttgttaaccaattatttacttcacacttgaggtagactttgttgccatgttggatggctattttgttaggtcaaacagttttctgccacatgcctatgtgattttaaataatgtagccctcaccctgagcttctgctatagggaccacatgctttgtggtaaccaggtgctgccaaaattggatgatagcaggctcctgacccatgcctgtcaagtcataggtggttaaggtcatgggagttggagtcagactgtctggttccaaatccaaggtctaccagttgattttgaccttaattttcttattctgtaaaatgagtttattgattgttcccactcagttcgtttgaggtgaggattaaatgagttaatacctgtaactttttgactggcacaagacacaatcctattacatgttctgaaaaaaaattctctacatgaaccaaaggaatgaattctatttcctccactgctactacaactcaacacttctaatcaccaaatgtgtggaggtttttctacatcagtttgtcagacacctactatgtgtcctataattcagttcagttctgacaccatctacatggaaacaacatccgatcccatggactaaaagctcagtctcataagactgtctataatggctcaagtgggttcttcttgcctgctgcacagaaaaaccaatacatcaaggcagtggtgttgcagtagagaaagcatttgataatcacaaggccagccaagtggaagcatgggagataattcttaaatctgcctccccaagagctcaggggctagggtttttaaggataatttggcagacaggggactagggaacgagtgctgctgatgagttgtggatgaaatcataggagtatccaaactgtcttcgcatgctgagtcagtttctgggtggaagtttctgcgtgggagtcaatttcttggcatgagtcacaggtccgggtggagtcagttagttgccagaatgcgaaagtttaaaaatatctcagagaccaatcttagattttgacaatagtgattttatctataggagcaagaggggaagttaaaaatcttgtgacctctggctacatgattcttgagcagtaactattatagaaaggtaagctagggaacaatgtctggttatcatttaattacacctacatcttagcagaatttaagttcttctcataagcccaaccttgtggactttcattagtcttacaaaggcagtttcagtcccccaccaaggagggcattagtttcaggtagggactgttatcatctttgttttaaagttaaaaaaggcagttagcttgtgatgttagaagaaagatgtcagatttctctcactgtcataatttttgcaaaggtggtttcatggccccacttgaaatgagaatgggaagtccaggttttcacctgtgctttagactgggtggagataaattaaaggttcacaggacctcctcctcagatttgaccatttgctagaatggttcacggaactcagaaaaacagtttacttatttgattaccagtttactttaaaaggaaattacaactcaggaagagccagatggaagagaggcatagggcaaggtatgtgggaaggagcatgaagcttccgtgcattcttgggctcatcaccctctcagcacctccatgtgttcagcaacctggaagctcttcgaaaaatgttcttaagccaggtgtggtggctcacacctgtaatccccgcacattgggaggctgaggtgggtggatcatctgaggtcagcagtttaagaccagcctggccaatgtggcgaaaccccgtctttactaaaaagagattagccaggtgtggtggcacatgcctgtaatcctagctacttgggagactgaggcaggagaattgcttgaactcaggaggcagaggttgcagtaagccaagattgtgtcactgtactctggcctaggtgacagagcaggactccgtctccaaaaaaaaaaaaagaaagaaaagaaaaagaaaaatgttccttcagatttttatgagggcttcattgcatatacatgcccctccctggaggttggtctggaggttgggctgaaagttccaactctaaccacatggttgatttccatggcaacagccctgcttatcattagggacttcccaaaagtcacctcattaacacaaactctggtgtgactgaataacaaaagatgctcctgttacctttattgctcttagaaaattccaagggctttaggggctttgtgccaaaaacaaacactatatatatcttattataaatcacactatctcacattattattatttaaaatgataagtcagtcaagctctcttttcttgagaatttgatttgggaaacttcgagaatgaggcaaggagcagtgggaataggagtttaaagtaagcatagaaagcatagaaagaagctagggaatagattaaggttgcaaggagggataacaaatggagattaggaaatagtggagactgtgattaagcagagcctgtcattaggcatttctgatataaacccagatgctgtcatatcacctcactgaatgcttgccctgaaacacttgttttagtgcagataaattcatcacctaaggatggcttatcctttctatggccattgaacttaagagctccactaaataggataactccctttatgctgggaaatctaccaaaattacctgtgtcagaagggtaagaaaagagaatccaggatccagaatgggattgaagtgatctcccattctttttgtgatatttagactgccttctgcctctccaatcgacagaataaagaccaaacttctacccgggtgggtagggcttatcctgaggatggagactttctaagtatagatggtcaagaaactggtgcacatttaagttagacgcatctctaaattgtctgggcttagactattctaagaatgaataattatgaaaattgaggcagctcagagactcattttctaagatttcaatatatgattagcaaagtgctatagaaaaaaataaaatggcacagtttggcagttggcatcttgtatctttctgtcccaggtctttcttgtgcttgtaattctttcattgataaagaactcagctatctatccaggcgtgatggctcatgcctgttatctcagcactttgggaggctgaggcgggaggatcacttgaggtcaggagttcgagaccagcctggccaccatggtgaaacccacatggtgaaacatctgtactaaaaatacaaaagttagctgggtgtggtggtgggagcctgcagtctgagctactcaggaggctgaggcaggagaattcctcgaacctgggacttggaggttgcagagagccaagattgcgccactgcactccagcctgggtgacagagcaagactccatctcaaaaaaaaaaaaaaaaaggattcagcaatgtgtggttcttttgaatctatggtatgtattagcacatcacagcagagcagaggttctcaacaattgattttattccccaggggacatttggcaatgtctggagacaattttggaacttagaggctgatgctattttggaacttagaggcttagatgctattggtgttgtgggcagatgacaagagagattgcaaacgttctccaattcagaaggcagcctccacaaaaagaattattcagtccaaagtgttaatagtgctgttattgagaaaccatgccctagagaagcagcctagaactttgagtttttccttttttttttttcaatcaactaatgagaataaatgtggaggagacgggcaaaaatgtcagcagccccgtatggttttcaaaatcatttcagatatttgctattcaccagtgtcagccaatgtgtttatttttgaaaggtcagaaatttcatagggccagattactaaaatggttattattatttttttgttttcaagagcttatgttagttatctagtatagagaagtctaccatagagatccctttgttctgagtactggactttttcacttaccaaaactctcctactctatacgttcttcaccgtgataatccaagaagtctgaatcctccccatggctctcccctgtttccatccccagtcggtgggtttcccacaggtctccagtgtgctttggaagtaggaactcctaacagattcacagtttgaacatggtagtcctctgagctgttcagtattttaaatctctctgcagttagttataatcattcaactcttttagtcattcttctaatgtcagtatagataactaaaagattgtaatattagaagacctatttcccagagaccacaaagacaatctcatggaagtcccactgtagtaaatagagtctattttctacccagcatctggtagagtaattcagacatgtgttttgacagtttgcctgaaagtaacttgacaaataattttactaaagaatcctagaaagtcaatggcaacattttgttcattctaagttgttcaagccacgtccttagatgtggttgattcaaatttcttcagaactggaaaagcacaagagaattagtattccagtaataaggaatcatggattgtggcagtctttttaaaacataaactagtttagcacataagtggtggcctagtacattttaaagtggagtccaagggaagtttcttgaattgctgtagttcttatggtgttctgctgaagccgtgtagatcttatggtgttctgctgaagccgtgtagatattgatcatgctgcctcccaccaccacccccttcattccagatctgctcaaagacaacttagaaggtcctatcctggtctcctgtctgaaacatatactttctctcctcccgcccccagcctgcccatactattccaatccttctctacctattattcctttgttttgttttcaatataaaaatcttatctatttctttatacgttaatcatctatcactccccacacactacaatgtgtgcattcattccctgagtaactgaaacctagaggcccgggagtcatttttgaaacttcctttccttggctttctcctctaactgctcttccaattcatcggctggatttgactattctaattccaaatctgtctggaactcgtgtacctctcgcagtgtccactgctgttgttctggtctggggcacaatcgacactcatgctcaccgaactgcagcagcccccttcctgctgcttattttgaccacacctctttttgaacctattctgtacaaaggagctggaaagagtcagtaaaaatacagagcatagtgttcattgccttgcttggacaggacctgccatatgtgtcttctctatagtattggctgaatgcataaacagcgagaaataaatgtgtagagagtaaattgatagaaagctgccctcagtcatctcccatggagagggctagtgatgactggcgaaggtcacagagctactatgtgttagattttggactaaaatccagtttttctgagaacggtcaagagtttatttatagaaaacatgctgctttatctcttaattccttctcactccctgcaaattagtggcattttagtttacttaaatgcacaattatttttaattttgattgaaaaattaatactcatttacttctgaaaactatttctttaccgaagagcatagagaaataagggagtaatttatcaacctaccataggtggaatttttactttcatctttatactttcttcttcattattgttttttttaaaaaacgtaagtatgcatttatttttataatcaggaaatatgtgaagttatataaatgtgtaatgaatttcattactgggaactaactgctggtgatattttacacttgattttagccaaaaggccgagaagcgatgctggtgatattctaatgtactataacttattctaatatttcatgggatttatttgcaattagtgtgatataaatttccataatgtatggaaagatatattagaagatgctaaccatgggcttaagaaagtagatttcataatttgaaacacggcccacacaattaataaatataagacatttggcactctacttctaatctcttgattttttttatagcaactgtctttaagaaccccagcatattcatggattttttagaaacctaattatttcctagaaaaatcctttgaaaaaggaaaattatatttgacagttttctaaagattttctgtgcagaagttgtatctggatatacatataaagccctgaagtaatctatacattttatcgctggtcttcagatatgttggcagagtcgctcgtgaaatatatgcttgaaattaatgtaattactctgacatttgttattttaataagcattcttagctaatacatagaggaatacattaaaggaactctaacaccaaaattatcctttcttaattaaataagaaggactgcaattatttaaaaagtgtatgtcaaatctaagttgccttcaaatgtaatttaattttctgttacttacattttaaaatggccatagcttttttcgttgttcatctttcttaattctttaggcactacttaccccccaactccagcaaccaaaattaatcctaatttgcatcacaataatttaaaatagatcaaagaaccaatttcatagcctaattcaaaagcatcatgcgaccaatatgtagtattaataaaacatatttctggttttgccaatccaattttttttttaattaagtgcttaacacagtgcccagcacagaaaaagcacttgatacatgtttggtaatgtctttgtgactgtcatttttactaatgttgtatattggtactactaaagtctaatgggatgcttgtattatggtgtgataatatagttaggatgaccacttgtcatggctggcctgtgagaatcctgtttaatatctattgttccagttttctccaacttaacattttagcactcaaaagtatgtgatgtggaggataaattttatggtcgccaatcctttattgtaaagaatcgtgatgcaaaggctccagtgtagtcatcactcatctcttgatttaggcatctaagctatccaggcatcatcatgggggtgagcagcctgaatgacagtaagctttccaagtatggggacatgcacttaagataggtatagttattccagtgccaatctcctcttacctgctgtatgtcaagaatcaggcaacatttaggaaatgaaaccacaagtctttgtctctttttttaccctttatctcaaaatggtttttacttgggatttgtttttttgttttttgttttttgtttttttttttgagacggagtgccgctctgtcgcccaggctggagtgcagtggcgcgacctcggctcactgcaagctctgcctcccaggttcacaccattctcctgcctcacctcccgggtagctgggactacaggcgcccgccactacgcctggctaattttttgtatttttagtagagacagggtttcactgtgttagccaggatgatctcaatctcctgacctcatgatccacccgcctcggcctcccaaagtgctgggattacaggtgtgagccacggtgcctggcctttagttgagatttgattatgaatgaaaatgtaaagaaatttgctagatgtgtccatcttttcatgtggcagacaatatggactagatatatggtggtcaaaattatgtttgtgggtatagcctaatagcctaaaccaatgacacttatgtggcagttttatttatttattttttctttttaagacagggcctcactctgttgcccagtctggaatgcagtggtgcaatctcagctcactgaaacctccgcctcctgggttcaaatgatcctcctgcctaaacctcctgagtagctgagattacaggcatgagccaccatgcccaactaatttttgtatttttagtagagatggtgctttaccatgttggctaggcttgttttaactcctgacctcaagtgatccacctgccttggcctcccaaaatgctgggatagcaggcgtgagccactacgcccagcctcaccctggactttatgacaatgccaaatatatgcactgtgtcaaaaacagtcctcttcactgtcctccagtagaaaaagctcaataatgggtctacaaactcctggatttagtccaggctatgtaatttgtggaacttagtgccaaaagtagggtcctttgttcaaaaattattaagaatttccagatggcaacagtggaacagtcaatgaagcacaggatccttctgtccccaaggtcctgaacaactgcagaaaccttgtgcccgtgcattcatccctccttcttggatcctttacctgttgatctccttcgttttctttccagacaacaattatggacaacttattattaatatatgtgagccactgtgttcactatcggaaataaaaatatgcttataaggtagtcccaaatctttttttttttttttttttttttttgagagacagtctcgctctattgcccaggctggagtgcagtggtgcgatctcggctcactgcactctccacctcccgggttcaagtgattctcctcccgcagcctcctgagtagctaggattacaggcgtgagccaccactcccggctaattttttgtatttttagtagagacagggtttcatgatagtggccaggctggtttcgaactcctgacctcatgatccgcctgccttggcctcccaaggtgctgggattacaggagtgagccactgtgcctggccccagatcttagattttggtgattaaggacttcacgaagtagatgaaataacacccagaatttggctggtttattttctccttaagatgctcagctgtgattttctgtatattagtctcaagctgcaaattctctattccaggatcttatgatctgtgtcctaactacatattatagggccccagtggtccctatgcctctggttctattgtcatcacacacttcctgtttcattcctatagacagatttattcatgactagggaacagattatgctagtaaaggtgttggttaacatgagtttaaggcaagaacttaaacgtaaatatctctagggattggacaggcaatatgccttaaatagtaaagctatcaggtagggattgactgcatgcctgcagaggaaactgctgcctatttagccacagaagattattgccatgtaaaaatgtgagtatggtttgtcacatatttttaaagaaaagtcagaaatccaaaaatttgtatgaaatttttaaacattttatattgtcaattcaatttttaaaaagactcaatataggcagagaaaaataactacagcccaaggttaagccaagaagtattgtttttctactttttcttcgtagtcagatttgttcagatataattcagatgtaataaataaaccctttaagttctatgagttttaacaaacacctacattagtgtgacaatcactgtagacaagatatagaataattctctcgtctcccctccaaaattctctcaagcctctttgtggttaattctcctagctcctgacaatcgctaataaatttcctgtctatagttttgccttttcaagagtgtcaaataaatggaacactactgtatgtagccttttgagacaggcttctttcactgagcacaaataatttgacttattcacgttgttatatgtatttagattgtttctatctaattttcaaaggttttttccttcctttcttctcctttcctccctccttccttcctttctttttttcttcttcctccttttattctgccttttttctctccttccaactttcccgcttttttagatatcacatgtacagaagtagattaatcttgatgtttatttcataacatactctcatttgggcccatgcatggcttgtatttcaatagctctattgagataaaactcatatacattcacatggagaaacagccctgtggagggaaagaaattgatatgcagtaaactacacatactcatttacaacttgaaaagtttgccatatgtatacacaatgaaaccatcaacactttcaaggtaataacatatctcagtttccttgtgtctttatgttattcttccctccttccatctgatctgctttgtgtcactgcattttctagaattttatgtaaattaaatcatatagcatgtgctcttttttttgtctggcttctttcatgcagcacaattattttgccattcatatcagtttttgtgtgtatcaatagttcattctgtattattacaaattagcattcaattacatgaatacattgcaatttattcatttgtgaatggacattgcattatttccagttttggctgtgacaaagattcatgtggaagtctgtatagggacatatgctttcatttctcttgggtaaatgtcttagagtagaatgcctaagtcatatggtagatgtatgtttaacttttaaagaaattgccaaattgttgtccaaagtgtgtaccattttacattcctggcagcagtgtatgagagttctagttcttcaccatcccccttccaacacttgctatagtcagtcttgcaattttagccattttaataaatgtgtagtgatatctcactgttgttttaatttgcatttccctagtgtctagttatgttgtgtctttacttttgtttatttgctatcattatcttccttggtcaaatatctgtttaataattgatacattttttattggactgtttgttttcttattagtaactttggagagtgctatatatattctggatacaaatcctttaacaaatgtatgatttgcaaatattttctcccagtctgtgattgtcttttcattctcctagcagtcttttgaagagcagatgctcttaattttataaagttcactttatgtttttttttattttgtggattggacatttggtgttatatctaaaaaaaaatctgcctaacccatagccttatgtgttttcttctagaagttttatagttttaggttttacatttgggtctatggtccattttgagttaatttttgtatatggtataagatgcagattgaagatttttttttaatatgtggaaaactgattgttccagcactatttattgaaaagactaatttctccattaaattgtctttgtacctttgttgtgaatcatttgcctatatatgtgtgagtctatttctgaattctcttttctgtttcagtgattcatctatgttgatgccaatgctacactgtcctgataactgtagttaataaagtcttaaagttaggtagtaaaagtctgctattttcttccttttcaaggttgcattttcctattccaagtaatttgcattaatcaaaaagtacatggaaaatgtgtattataacaaaaggtatggaattttaaaattttcaaaattcttttgcatcaaagtaaatgtgtactaacttgttataatatgtgtgaacaggagctagtttgaggcactaaaaaggataaatcatcaatttaaaaacagcccctatcagagcaacatgaattctgataaaattgaagcaagaacaaatatcaaatttatcgtgaagcgtgggtgaaaaaagggtgaaatcattgatgctttatgaaaaatttatggggaaaatgtcacattatcaaacagataactcattttaagaacagatgatatgatgttgaagtcgaagcccacagcagcagaccatccacattaattgataggaaaaaaattcatcttgtttgtgtcttaattgaagagcactgatgattaacagcacaagtaatagccacaaccatatacacctcaactggctcagcttacacaattctgactgaaaaattaaaattggccaaagtttccactctatgggtgccaaaaccattgtgcccagatcagctgcaggcaagagtagagcttttgacggaaattttaaacaagtgggatcaaggtccagaaagatttcttaaaagaacattaataggagatgaaacatggattatcagtatgaccctgaagccaaagcacaatcaaaacaatggctaccaagaggtggaagtggcccagtcaaaataagagcagaccagtcaagagcaaagatcatggcaacagttttttggatgttcaaggcacttttcttgactttctggagggtcaaagaacaataatatctctcattatgggagtgttttgagaaagtcaaagcgttagcagaaaaacgtctggcaaagcctcaccacagagtccttctccaccatgacaatgttcctgttcattgtcacgaaacaagctctcacgaaataaagctctaattttgcaagaatttcaatgggaaatcattaggcagccaccttacagtcttgatttggtttcttctgactttttgttttctaatcttaaaataatctttaaggggcacccatttttccttagttaataatgtaaaaaagactgcattgacataattcaattcccagggtcttcatttcttaaggaatggactatttggccggtatcattgcttacaaaagtgtcttaaacttgatggagcttatattgagaaataaagtttatatttttcattttaatcttttaattatatttttccacaaaatttttgaagtcctctcacatatataaatttttggaatcagcttatcaagtcatgtacatttactgctatatcacactctgttttgtgaatattccaaaattatagtctatgatttatattgttgtgactattgcataatttacatatcaatgtactgatgatcatattttgcaatatttttgttattgttattctattatgaacagtgctactaatataaatagtatttgccacctcatacacaggtgcaagtttattgtaatagtcttagtattaaattttctgagtcatagtttagcaaaagctcaacttttcacaggatattgctggattgttctccaaagtagctaagttatactcctattagccgtatatgagagattctaatcatcttcattcttcaacatttactattttcagacttactaattttgccagaaaaaatacatgacaattcatacccgtacctgtagtggtcttgatttccatttactcagaagacattggacttttcttcttatgtttatgggctatattttcccttcttttatgatattactgttcatgtttttgctcatcttattgggttatgggccattttattttatttttattttttatttatttatttttttttgagatggagtctcgccccgtcctgcagactggagtgcagtggcactatctcgactcactgcaacctccaatgggccattttatatcctaacatatgaagtatctgttcaaatcttttaccatttttttcctgtaggtgtgcttgtccttttcttgttataataaaacagttctttatttttgatactaatcttttagaaagtgttctgttgggctgggcatggtggttcatgcctgtaatcccactctgggaggctgaggtgggtggattacctgaggtcaggagttcgagaccaacctggccaacatggtgaaactccatctctactgaaaatacaaaaattagcccggtgtggtggcgggtgcctgtaatcccagctactcgggaggctgaggcaggaaaattgcttgaacccaggaggtggaggttgcagtgagctgagagcatgccactgcactctagcctgggtgacagagtgagactccatctcaaaaaaaaaaaaaaaaaagagagagaaaagaaaatgctctgtcagtggcaaatatctcttactttttttttagttttctttgaaacctcttttaatgaatagaaatttttttattttaatgtagtttaattcatctatttttcttttttaattgtcttcagtttctttagtcttgttttcataatcttctggatatgagtcttgcaaaacatcttttgttaattttctcatggtttttgttataatagtatttagagttattttatatatttatggttaatataaatcaaattgcatgttgttcttgctctaaattacagattcaataatttgcaacaaaaccttatctctttgtaagtccttaagttaattaagtactctggatatcttcacatataaatacttgtatcagctgtcttctctcttactactccaattaaaatccagtatctagaatagggaaaaaccaggtgaacatcacccttacagagatttattttaagacataatttagggtgtgctccatactgccttggctatgtactagtctatatattctagaagggtcatatatgtgcacaaattgatttgtgtagccaaaagctgctccagtataaatgtgccaccaggatccatttcaaaacattgcttcctcttgccaaggttagtgcagctatgcttgctatcactcaagtaaccagagaatgccagcgtccgtactctcaaaaagacagccttttctgcaccattacaattggtgtcttttgtccctttcttttcactgatggaaatcttttttatcattccaatcaaagatcactaccttcctaggagaagtttcaatagaaagaaaaaaatgttatacttcctcagaaaaatagcactttcttcatatagcaagttttactttcagaaaagttgagaaaataaatactatgcccccaggtttcccgttattggagattgattgctatgttgaatgtgctatagctttgctgcttaaacccaaacgccaagtgcaggagtatcttctttactaacgcatttaatttaccaagcacacttagtggctggtatttcttacctttctaagggtgcactcacttacactgccctcaatatatgtaattaggataaaaccatagaatggaaggcattaaaaatgaggcaggaaagcacaggcagagtgggatgaagccagctttgctctgaataggacttatatgatcagtttagttttattccaaacatgaaccccaaattcaacccctttgacctgagtactccgtcccttaaatggcaaactaaacattcgtgaaaatttaatggtgaggaaatgagtaccttcttaagtttcagatggtgaaatggcaccaggggagcactttcagtggcaggcagaagtgtgtggatgtgctagatcaaacctgaaatatttgttccttcatcctgcagtccctctccaaactagccagccactgagaccttctgacaggacacccccaggatgtcacccaaaaaaggtatttacaaaatcaagactgtctgtaggacactatgtctttctgagaggtataaaggtatttgaaaactttggaaagtttgttttacaatttttgttccctcttttggggctttccctttttcatttttttctgtgggtagtttccctttgtttcctgagaaattgagaagggtttaatatctctccaccttcttctcttttatggatgaatgatttcaccaactggtaagtgctaaaactgacctcgctttcactcagaaagacaatggaggaaaggaaaatgcactgagatttcagcatagcaactcaaatgcgggctttattccacagcagtgacctattgtcagattggtgtgtgagacagtttttgaaaggggatgtgttctgcttccgtttatgagttaagcaaagttctaaattaagttgagaagaggaagcaggtaaagtcagggatagcagagaaaggagacatcaaaccctattgttgtaggatatttatgtgaaggaatgagcaacgtgataaaacacatttttgcttgctgtgacttgccatagggtgcattttcagtactgtgtggataatgtgtggcatgttcattcatcagtcattctgtgacatttatgtagcttacacttggatctattttcaacaacatttcagttccctaaagacaaactggcagaattttcaaataggaaaaacctggacacacacatttgcttttctgtatagactgtctagtccagataatcttgctatcagtcattttgttagcttactcatttaatcttagaatggaaagtggaaacagagacctcatttagagataatctagtaaagccatccagcttcaggctcatatcttgggaatctgagcagtaccctatttaatatgctcattttattaactttaaacacctggagaacatcattattgagaaggtcattgcttttgaaaaaacaaaaacaaaacaaccacttcttatgaggctctacacatctttccaaagaagctattggaaatggcccaaactttcatattaactcttaacagggtggcgtggtttttcattagtaagaacaggattcaaatcttatggaagatggtagatttcaacaccttagcatttttctcaaccctgggatcttcaagttcctcaggctatttaggtagttatagtgctggcaaactttttaagtgcccagtagtttttacaaaaacttgtaataaatctgctcaggctatcttaattgccaaccatctcattaagcaagtcaaattagaatggattattcctgctgtttattagtgctgcatattatttatcatttattaaccttattgtgctcacatagcaggtattttaaagtttaacagctttattttaattatgaatgtaatatatgctgttgcagaaaatatgtaaactttagagaaaatgtactaaatgatgcactgatgaaaatacagaatcccaccacaaaaatattattatcaacatttgggtattctcttccaaactttttatatgagagttatgtttggtttatacataataaaatgggtaaaaatcaataaatagaaagcaaatgtttttaaggcagtacttgggcttcataagaatggaaaaaaatgatagacttgcctggtgtggtttgcataatgtcacagaatcataacaatagctccattattgagtgtctattatgtgccaggttctgtacaatgttcagtgatgcgtcactgtgatgactagaggtaaaggaaagataagtgatgccttactatgatgacttccaacaagctatgaagggacagaacaagcctttttttttaacttttattttaggcttgggagtacgtatgaaagtttgttacataggtaaacatgtgtcacaggggtttgttgtgcatattatttcacacccaggtacctatgtccagaacccaatagtttagttttcttttctcctcccctccctcattctatcctcccccctcacatagaccccagggtctgttgtttccttctttgttttcataagttcttatcattatcatacttataaatgagaacgtggtatttggttgtctgtttctgcattagttggctaaggataatgtcttccagctccatccacgttcccacataagatataatctcgttctttttttatggctgcatggtatttcatggtgtattttatatatatagatatatagatatatatataaatatatatagatatatatataaatatatataggtatatatatgtcacatatatatatcacatatacaaggatatgtcctctagctccatccatgttcccacataagacataatctcgttcttgttttatggctgcgtggtatttcatggtgtattttatatatatatatctatataaaaatatatagatatatatatcacatatatatagcacatgtatctatatcacatatatatatatatcacattttctttatccagttgggacagaacaagtcaactggcaagtccattgctcagcttgttgaaatactctgcacagaatgcaaggaaaaactgttttcatgaggtagcccatgaagcgatgaagcaaggcaaatttatctgcctggataacctcctgtatgctgttttcactccatggagagtcaacacaacagacttctgagttgtattatcgagctccttcaacagggcattgctgtaagatcctagatcccacactccatggtgtgatgttttagccaagtctggaagtagcacaggccctaaaatctcatgattgcaggttgtcaactctgctgtaggcttgccacttcaagggcaagtggttggttggggctgggatttgggcagagccatagaaagaaagggaacattcaagggaatttgatgatgtgcatgatgtctctgtctgatacaaaaagaaaaaaaaactctaaaaacatttgatacatagaaatactagtatttggtgagattgaatgtgggaagatgagggataagaaggtattaagaatgactcccaagtttctgacttggtcagttgagtagaagggaaatttttatttttatttttatttttaaaatttcagtaagtttttagggaacaggtggtgtttggttacatgaataagttctttagtggtgatttctgagattttggtgcacctatcacctaagcagggtacactatgcccaatgtgtagtctcttatccctcaccccccatcctttcccttgactccccaaagtccattgtaacattcttatgcctttgtgtcctcataatttagctcccaattgtgagtgagaacatatgatgtttggttttccactcccgagttgcttcacttacaataatagtctccaattcatgccaacatctattattttttgattttttgatcatgaccattgttgtaggagggaggtggtatcccattatggttttgatttgtatttccctgataattagtgatgctgaacatctttccatatacttgttggccatttgtatatctgagtagaaggtaattctaataaataaaacaggaaggcagcagaaagaggtttgtttgggatatggcttgattatttgcaagatatttgctgtagcttaggagaaaggtggatgttggtgatactgattttgtcattatctgtgagttaaagtttctaaaatcacgtggcttcctagggaaagcatatagaatgacaagggaagatggctagatggctagtaatggcaccctgaacaacttcagcatttagaggtgggtggaggaggataagcccatggaagaaacagaaaggatgggccagcgagatgagaggagaagctaagggagtagacagttaccagagggaaggtgggatcagttaagaaccttagtatgttgcaaagaaataacctgcaatgcggaccaacccggggaacgtctgtaaaaatgatgacaattcttaattgtaatttaaaatgtaattgtattgagagctctctctgtctttgtctcatcataatttgaagcagattaactacatattagctagaaaaagccctttgaaattttccttcaatgtatcaatagattctatgactttttgtaagtagaaactgcctattggtaaaatagcacttaattgagataatgcttgtgaaagccatttctaaactttgaattgacatacaaaataaaggtggcaatcatcaccatgttgctatactgtctttggccatataaaatttttttcaacaatacaaagataagccttgtacaaattcttcaaaattctaaatttgtggtacttgaataatgttttactatatataaagatgaatagatagcatttcctacaataaataaataatttatatatcaatgtgttgggattataaattctcatagaaattcactttattaattcattcattcatctgatcacagttcattcagcaaataatttgttttgttctttttaagtgctctgggaagaaggtattgtgacagagtcccttctctcaaagcgtttatagattcatgtgtttggggaaagtacagaacaattattgaaataaaaccagagtcaggcacattgctatgccagctataaagagcctatgaaaattaggaacattgacacatttgttcctaacctggtttgtgctttcaggattcctctgaagtggcagcactccttgggtttgaaatgttcgtcagtaatgactgatggacatcaacaggtgaatagacacacaaaaaacctatgaaacttacataccataggttactattcaacaataaaaagaaaaactgttgatacatctaacaatgtagatgaatctcaaaagcattatgctattcctttggctgataaaatggtgacactcctttatttctctttctttcatcccacttttaaaatcagccttagtatactttaggcacaatatactatatacatttaaaatgacaatttgacaagttttgacaaatgtatatacattataaaaatcatgataaagatttccgccgcctcaaaatgtttcctcatgccttcttggaataaatccacacattccttccttctctacaccccaccacccatatactctacctctagacccaagcaattgctagtctgctttttgtcagcgtaaattagtttgcattttctagaatttcatattaatggaaatgtacagtaagtactcttttgtgcctgacttcttacatttagtatagtgcttttaagatttatccaaattgttgggtgtatcaataatttgtttctttttattgctgagtagtattctattgtatacgtggttcacagtttatccattcaccagttaatggacattccagttgttttatatttggggctgttatgaataaagctgatgtgaacatttgaatagaagtctgttgtgaatgtttggattggaattgctgggttgtacagtaagtgtttgattaacttcataagaaactgccaaatgattttccaaagtggctacatataattttgcattttcaccagcagtgtatgagatttccagttgatcctcatcctcattcaaaacctggaattaagagtgaatcttttaaattttagccttttgagaaaatgtgtagtggtacttcattgtagttttagttcgcacttctctaatgactaatgatgtttaacatgcttttatatcttcttttgtctccatctattctttgttcttcattctcttttcttcctttagagtaagtattttttattttattccattttcactattggtatattatctataaattctttgttgttgttccattttagtgggtttacaatataaatctttaacttatcacagtctgtcatcaaataatggtataccccttacatatgttttaggaaccttacagtggtaaaaatatcagttccccatcctgtacttgttgctattgttttcatgcattttattctgtatatattataaactctacaatctatcattattactttttgtttaaatattaaattctttaaaagagatttttaaaaataagaaaatagtctttcatattttctcatgtatttgccatttttattgttttttttttcttccatatttgagatccaaatttctatctggtatacttttccttctgcctgaataactacctttagtatttttttgtagtacagatctgttggcaatgattatctgaacttctgtatgtctgaaaaagcctttagctaatttttgaaagttttttgatggacatatgatatggtttggccctgtgtctccatctaaatcttatcttgaattgtaatccccatgatccccatgtgtcaagggtgggaccaggtggaggtaattggatcatgagggccgttcgccccatgctgttctcctaataatgagtgagtctcatgagatccgatggttttataagtgtctgacatttcccctgcttgcacttctcctttctgccaccttgtgaagcaggtgcctgtttccccttcaccttctgccatgattgtaagtttcatgaggtctccccagccttgctgaactgttagtcaattaaacctctttcctttataaattacccagtctcaggtatttcttcatagcagcatgagaatggactaacacggtacatacaattacaggttgctagtcccttttttcccttcagtgctttaaggatttcactcttccatagtttctgatgagtagtctgaccattcctaactttgtgccattattttctcatttttttctgactctcccttctgggactccaattacaaatatcccagacttcctaactttggcaggtcaagagatcgagaccatcctggtcaacatggtgaaacccagtctctactaaatatacaaaaaattagccaggcatggtggtgggcgcctgtagtcccagctacttgtaaggctgaggcaggagaatggcttgaacccgggagggggagcctgcagtgagctgagatcgcgccactgcactccagcccgggcgacagaccgagaatccgtatcaaaaaaaaaaaatcattcaaaagattactgatgcttgtttcatttttttttaatttttcaactggtaattaatttattaaaatagttgacttatacgtctacaatggtgacttccatctcaactcctggctcaatactgatggaagtaatctgcttaacaatctcagaaggactgagcaagtcaatgagtcgcttgtggattctcatctggaaatgatcccatggcttagaaccttcaccacatggagttttttcttgtagtgattctcaaagtcttagtaggcatttgaactggtcttttcactttgagattcttttcctttgctcctctgatcaagtcagcacacaccttcgccagggattttacattgcagcttgttagagtgattcgaattcggtgaattgccatcttcggctccgtgggtgtttttccggtatccttaaaagccatcactgctgcgcggcttcctgacctacttgttccggcaagagtgaacagtggtgagtcaggagcaggtgcgggcggatcagagctccacaacacctacgaccacctcttcttcaaagaggtgtttcatgttttaaaatcttaatttccttctgtttcattttggataaaatctgtcttcaagtttggtgcctttttttttgggccaatatctaatctaaagttcatcctatccagtatgtttctcatttcaaatattgtattttctatctgcagagtttgatttgtatttgaaaacgttttttaatctttctcattgtcttaaacatttggagtatacttataataattgttttactgttgttatctgttacttctatcatctatgaaattactatatctgtttctattgattgatttgattactattctggttgggaggcaatattttccctacttctttgcttacttggtaatttttttatcaatgaaaatttataaaagtgaacttcatttacaattggatataatgaattttacatttttgtgtcctggatttttctgtattcctttaaatattgttggatttcttttttttcccccctccgggatgcagataagtttcttggaattagctggatgcttttgagatttgcttttaagatttgttagggtgaattcagagcagggctactttgatctaggaaatagccctctgaagggtctcatgttctgtgagataggaggtctttctcctctgactggttggtagcctaagctattcctgattcttgtaaggtctggacactgttctgcatactcttttctgatagttctttccctggccttagtagttaccacacatctatgcacatagcggtattcagccaaagtttgaaaggattcaaagatctccagagctctctctgtatcactgtttctgttattctatcccacaaattctaagtgtgtgaaactccctgaaatcagaactatgtctcctcaactcagtgagaccacaagccactgtttgggtttcccctgcccatgttgcagcctagaaactctcctcaggcaaaaagatcaggcaacatcggggtcatctcatttccttccctttcagagatcactgtaattgcctattgaacaatgcctgaagaaagatgtttcatatattttgtctggctttctagttgcttaaggtaagaaggtaaatgcattcctagttactgcattgtggctgggagcagaattccaatactgttttttttataatatgcttttacttaattatttgaggattccctttagttatcataattttacatgatgtaaacaggtaaatgagaatatcttcaaaatatatttttcagttttggggtggttctctcagttctggtttttgccaaatataatagatttttagtatctgagttccatatgacaaaatttataaatcttgggtgtatccatatggtatgttataatcggaaaagatagatgaaattccgcttttgtctaatgtctttataggtcttggagaaacttgaagaagggttgtaaagtccataactttacaatgagacaaaattaaaagaatccaagccaaaattgtcctagacaatgaaaagtatcgctatgcagaagccaaatctcttaagctcctccaccatatcagtcatgacacagtctatagtttaacaattgtttcaatttggaaattaatttttagtactaatttaaatatttcatattagtatatgagaattcttccttctgttcaggctgtggtatggggaaaagtcagttcccatcaatgcagattcatatctaccagcacagtgattaaattatcctcatatcctcttgtgtttgaacaagctgtgtacttttaattttaatggatttaactcaatattcaatatatgttgattactgaatacaacaaaaagtgtaatagacactccttgagaagctcataatctatttgggcagatggaacaaatacttagaaaaattgaaaggtagtttaggaccacagtaaaaaaaaattgggggtgcaggatataaagtatcaattgaattgtagaagcaatatatactgtgtattttttcacctgggtgagagggtgagactccgtctaaaaaaaaaaaaaaaactatggttgttcaccataactaaacatttaatctctttcagtctatcttactcatctacaaaatggagataatacctgttttgcagtgcaggccctgacatacgggtagagttccataaatcctagcttctattccttaactcttttaactcttttcttccttccttctttctagctaatttttaactctctatcctagacaacttttgctaaacgtgtataacatgtagtacctacgcataggaatatgttttatagaacagaattattgaaaacagcttcttacatttctgttattttttcaaaagcaagaattcatgtattccttctgagccaagtacatgcaataaaaagtaagagagattcagaaattctgatgattattctcccaagaagagtgcttgctagagtgagggtcttgcagacacagaaggagctgatggggtgaactgctggggtgttacaaaaggccttcgggaaaatacgtaatctaagtcaataaatcatagagtgaagattccctcagggaaaaagggagtggttctgaagaacttacaaatttttccaggcaatagccacagatgctagcacaagggcattatggccacatagtgtgagcaaaagtgcttaactttttgcccttcttctaatatttactctattagcccagacaacatgagatccagaagcctcatgatgagtggagaggaaatataaatcagaagaaatggtcaaaaagatgcctatattcacttccgcacttaggtctccaagcctcagttcctggcatgagtaggtagaggagaggagcttggaataggatgtgagattacagttttaatatagactggactggatatttgaatacctgaaaatgaatctgaattctcaaaatgaggtggttcctgcaactgaaaataacaagaaagctacaggatcttctgccatgttatccaggggtggaaaagtgaaattcagtggagccaggttaaagatggagtttgggccgggagtggtggttcatgcctataatcccagaactttgagaggccaaggtgggcagattacttgaggccaggatatcaagaccagcctggccaacatggtgaaaccccatctctactaaaaataaaaaattagccaggtgtggtggcatgtgcctgtagtcccagctactggggtgggtgaggcatgagaatcacttgaacctggaagggggagcctgtggtgagtcaagattgcaccactgcactcccgcctgggcaacagagcaagaccctgtgtgaccttgtgtccaaaaacagacaaacaaacaaataccatgtggagtttgtttactctttaaacaaatatccttcatgtgttgaactgaactataattatagttagtagggcacatagcaggttttaataagatatctagttcttcctcttaaggtaactcgttagaacttttatgagaaagaactaaagaatttctaatggggcagctaatccactcttttgtgcactctgttctgctgatgatctgatgttagtcggggtttctgtttgagattcctgagccttaactgctgatgacagagttcaaaatcattgctttctaactttgagaatgactgcctaatatgacatcattttctacccctgagtgctaatagtctaccttattcctcctgcctgtccttctccttgaggaggaggatcatcaatgcactgtgtggattgaagtggcttcatacccttttgatgttaatgttctcctttgcttaaagtgtgaactgaatatggatccctcatttatgaagcaccatgacacttcctgggtaatgaacaattaaacagacttctcagcaatagtgactatttttctgatttttcacttcatggacaatattgtatgcaagttaaatttgcaactagcttgaggcttcacacatggtgagtttgagaaattgaattctctacctcaaatgtatttccttttccttgaactctacattcaggtcagctgtccagttcttaaacaacaggttttggagaggcaatgagtaataaaatagcattttctccttcaattctatctgcatttgaaaaaaataaccttttatttttgattcaaagaagagaggagttttcttgtctttctacatctgttccaactcctccaaatgcacaaaaattttttcagagcattccagagtttctcagactgcacatagaagattttgcatatagatacatcttggccataataaccttctactgaattagtagaaaatagatgtattctaggttttcatatctttatggcaatatgaatagacaaggctcttcttgcaaaaatatctcctgaactgtgcgggagatgcttggaagacccagtcaaaattacgaagtatcccaagtttgtatcctcctgtggcttccccgtattacaataatgtcattctgatccaggttccagtactctcaagcccttgtccttcccttttcattttagcttgcattcatccaagtatttggatggaaattatcaataccttatacgagaacgtatgggaggctgaggcgggcggatcacgaggtcaggagatcgagaccatcctggctaacacagttaaaccctgtctctaccagaaaaatacaaaaaattagccatgcatggtggcacgcgcctgtagtcccagctacttgggaggctgaggcaggagaatcgcttgaacctgggaggcagaggttgcagtgagccaagatcacgccaccgcactccagcctgggtgacagagcgagactcatctcaaaaacaaacaaacaaaaagaatgtaaatgattgggagttaaaattatgcttttcagttttcagccatggatcatgttttcttgccttgcctgattcctagagtctcactccatgatgtttcctctttattataaagattagatggctttgcattgctgccatgtggcatttatacttctcaagcagctgtgtcatcttattctaccgtttaaacttagttttactttaagtccacatctaaactgtttgcctgcatgcccagcactttttccaccctctacattttatttgactggagcaatcaccttagcctctctaggtctttgcttatcatcactctgctcattcttcaagcctcacttgattactgcctcctctgtgttgctttcctggatttcctcagtaagacatagtttctccctttcatacttctgtggtattaagtatgcaccagttacatgtgactcatctccaagtgctttggcatggagatattatttatgttccttatatgactactgaccacttttttctagactaaatattgaaacacttggccagataattttgcttaattttgagtttccttttatactttttaaaacaaatttttgaaattaaattacattttgttaggttgcaaatctgaaaaagtccaaggatgaggtgagtttgttgtggtcagttgggtagttgctaaactcatagctggtttgtgtctgctgaccagcacattgttagcctagagaaagtctacatggggaaccagattatgatgcaagcgttgcttggagagcccttgatcaagagcaaaacaggttggtagactcgagggatagttcagctaggtctgatggaacattccagttttgccaacagaaggaaaaacattggaagggcttatcttccccaggatctggatctgttccactgggtaacatttaataagcactaacatggtctcttctttcacttgccatttcctgtgcttctttttccaactactacatctcctttgacacattttctttttctttttctttttttttttttgagatagagtcttgctctgtcacccaggctggagtacagtggtacgatcttagctcaccgcaacctccacctccccggtccaagcgattctcctgcctcagcctcctgaattgctgggatcacagatgtgcgccaccacactcagcaattttttttttttttttgtatttttagtagaggcagggtttcaccatgttggccaggctggtctcgaactcctgacctcaggtaatccactggcctcggcgtcctagagtgctggcattacaggtgtgagccactgtgcctggcctctttttaagtgtatcaataccatcattttggctgcttattctgccctgggagccattctgtctctttaggaagtttttgcgtgtatcagatctcatcttttatattttgatgtttaatagcatttaaaggattttgttttgtgttttttaaatgatttgaaaacaagtgtgctcactaattaataaacagcagattcaaacttttgttgctttttcaagaaaaaaatgaaaaattctgtaacaatatatcttagccataaaacacttgtaatcagcactcctccagaaatttcaggatgtaagttatcttaatgattatactagaaaatcttggaaagcagggatatggctaactttttataacatgtatccctactgtcacaacaagagttaagacttaataaatacagtcatgtgttgcttaacaactgggatatattcttgtaaccacccaaggggttcattttgcctgctacctggatacagccaatttatcaagaaccaggaattgcagtagagaaagggtttaattcatacagagccagctgaatgggacactagagttctattactgaagtcagtctccctgaaaattcagagggtagggtttttcaaggatagtttgaagggccagggaatggtgctgctgattggttggagatacaatcatagggatgtggaaaatggtcctcatgcatttctcaagtccactccttttcttagttcctgcttagcggaggtgttagaatttgcttcttggtggggccacaggactggttggtgggtccaggtggggccaccagttgtcagaaatgcaaaaacctgaaaagacatctcaaaagaccaatcttaggttctgtaatagtgatgttatttgcaggagtaattggggaagttgcaaatcttgtggctaatttgttagtcctacaaaggcagcctagtccccaggaaagaagggggtttatttaaggaaagggctgttatcatctttgtttcaaagttaaactataaactaagttcctcccaaagttagttggacctgtccccaggaatggacaagggcagcttggaggttagaaacaagatggaatctgttagtttagatctctttcactgtcataattttgtcactgttaacgtttgcaaaggtggtttcactgtagactttataaacaccatatacttagactatactaagtttattaaaaatatttttctttctttagtaacaaattaaccttagcttactataagttttttactttttgaagtttttaatttttttgaacttttgactcttgtaataacagcataaaacacactttgtacaactgtacaaacatattttctttatatacttattctataagtgctttctattttcattttttccctttaaactttttaatttaaatgaagacagaaacacaataccctaggtctacacaggttctggatcatcaatatcattatccaccacctccacatcttgtcccactggaagatcttcatggacaataacacgaagctctcgtctcctgtgttaacaatgccttcttctggaatacctcctgaaagacctgcctgaggctgttttatagttaatttccttttttacaagtagaaggagtacactctaaaataacgattaagagtattgtacagtaaataaatacagcagtaacagagtcggttattatcattatcaagtattatgtactatacctaattgtgctacatttttgtatgcctggcagtgcagtaggtgtgtttcaccaggatcaccacaaacatatgagtaatgtgttgatctatgacattaccagagctaccatgttgatataaacaggagacagggaaatactgggtagaagagggcagttccctggcaaaagccttactcccaagcctggaaacctgcagtcctaaatgggaataggcattcctgtttgtgcatccaaatgttgccttttggcctgccatgcccctctgtcctgtatccatataaaccccaaatcccaggcttgatgagcagatgagcagacaaacagaagagcagaggagcagaagagtggtgctgcagagaaagagagaagagaaggagcatctgaatgtcaagaggagtttggatggggatggtcagagaggagatcagctgcaggacagccaaactccaggggaagatcatctctcactccatcccctttccagctccccacccatcctgctgagagccacctccatcacccagtaaaatcctcacattcaccatccttcaagttcatgtgtgacttgattcttcctggacactggacaagaacctgggtaccaagagggcactgagctggttaacacttaagccatctgcggatggcggagctaaaagagcactgtagcacacccactggggctttgagagtcacaggcacacacccctagatgccaccgtgggatgggaacccaaaagtgctcgccctggctcctgcacctatctgtctacatgctccctctcctataacaggcttgcacagcagtgactgcgcaacagatgagccacaccccttccacatgtctgcaaggggtatcagggaactctcccctttcaatgtcagtaggtaataggaattttttagctcctttataatcttatgataccacctttgtgtatgtggtctgtcattgactgaagtgtcgttatgtggtacgtgactgtatttattgagtggatggtcaattgtatgaggtacttgaataatgagtggtgtgaaccttggttttatgacatcttctgagagctgctttcaggtgggtataagaagagatatttctagtctaggtccccactccttttcttagttcctgcttagtggaggtgttagaaaaaaaggttggactctggcactattttcctccattggttatatggactcaaagccataacttaaggaagaatgtctatttttagatttggtgactgatttagataggttgctacagaaagtggtacaaagatatttcacacatagaatatcaaatccagggtgctttagcactgcattccaatggcctgggatggatgggtggaagccctggcaagctgaaataaaccagggcaagctcctctttggaattcacaagtctgacaactggtgactcaggctctagtcaggagacctgaatgttacgtctggcatcacgataccttagtttacagagattaatctaacaggccttcagttagtttgctttattttaaaattctgcttagctttttgttgcctactaaatttctcctgatgtatatttagatgtaggtgaaggctgtagatgtatgcactaccaacaccagcttctgggagggaacattttcccactcacaagcaagtgaactttgctttctccatgaagaagaatgacctgcatgatggctttcagaagtggagaacatggctcacagttccctccacagttcctccatggcctttggttgcatcttctctgaatggaggagcttgggttatgtgaaaagcagagctaccagactacataaatgttttagtgagaaggcagcaaattaaaatatcagaaattttgaaaggaaaggtttataatagttagatttaaaacatactttgaggccaggcagcgtggcttacgccagtaatcccagcactttgggaggccaaggcgggaggattgcttgagggcaggtgttcgagactagcctgcactacataacaagaccttgtcctgtctctattaaaaaaaaaaaaaggaaggaaagggaagaaaaagtgctttaatattcagaggcatgagagatgcaatgagtaatataggaccttctctaaggacactgggggagcactctacagaggtggttctaatctagcctggcaaatctctgttcccttcatgccttgtacttccttcttctttgtgactttgctaatgttattccttcctcttggacaaatttcctatactaaccaaaaggccccaagacacagggggaaatgtggtaaatctgagactggaaggaaattaccatctaatgtcactcttgtacagtataactattgttaatattattgctggggtcactcatttattcatatcacaaacactgactgagtgcctattatttgccaagcatgggcaataaagagttgaagaccaacaaagcccctgccttcccagaagcttatttgcttgtggggaaaataaacagtggatcaattaacaaataagtagataacataatgtcacggccaggcgtggtggcctcatgctggtaatcccagcactttggaagactgaggtgggaggatcacttaggcccaggagtttgagaccagcctgggcagcatagggaaatcccatctctaccaaaacaaaacaaaacaaaacaaaacaaaacaaaacaaacaataaacgaaacacatggtggcgtgtgcctgtagtcccagctactcaggaggctgaggtgggaggatcacttgagcccaggacacagaggttgcagtgagccaacatctccccactgcactccagcccgggtgacagggtgagaccctgtctcaaaacaaacaaacaaacaaaacaaccaaaaaccaaaaaaagtaatgtcagatggtgactgttttgaggaaaataaagcagggtaggggaactagtgataactggtagatttgggtttctccatctctggctgcttttgcatcctcagtaaggtgagagtggcaaaggaaattccaggttgactttcgggttcagtgaattttctaccccgtgtctcttcactgccctttccctccccagaacctctaaaatctgatccttagattctgcaatgtaagtcagcttccttcttcctggttgccagctcactacattcttattcctggataaaccaaaaatctcttccttgttttcatattttcaaaaagatgtagaaatctctcacctgctcatgttccttcctttttgtcttgttggtatatataccttttacaattctttcactaccaaatgtagttggatattgggatgtagtcacaacaaacacataaatacaattcaccatttttaaatggacttattcatttagtctgcttaaaattgagataataacacacgcaccagttgggtttctctgagaactctgggcatttttaatcctggcaatttttaaattgcttagcagtaaaacagtcagacaacagcacctattgttataaatccctgcctcttcttacctcaatgaggctatcctttctctctatcaattctgtcagcagaattaagaagagccattgatttccagtttgttcagcgtttttcttcttaggatgggagtgatgacttctaacctctttacatctagagactcaatttaagtctacttctttcattcagccttctctcttcattttcagctgcctggaatgtcttctttctctcagttcctatctttgacattaaaaatcacagtacttagttatattctacctcacaccaatcattttacttgttaatatcttttttcctagttagattgtgacattttggaataaaagaaaaatatccttttttactttatagctctccagatttcattagattagtatagattcgagtgccttttatatatcaggcaatgcctagtgtataatatttttacttatgggttttagcatttaacttatttaatgatcacaacattcctatgatgttatttgttttcataatttgttgaaatgaaagctgatggtcagaaaggttaaaaagttgtctggtcataatttttgaggaggcagagctaggttttgaacgcaggtctgtctgattctgagaataatcctgtgctccttcagctgaaccacacagcccctcttagtgctttgtctccatagacactaagtgtattcttgttgattgagtgaattaacgagtgaattatctggagctctttctgcttctgttttcttctctgtacaatgaggatcatcacatgaacctgatctaagaatagaatagtccaactgagttcccttaatttggtaaccaagagagagtagagttaattaactagaaccctttgccatcacttctctctaaacttttcatcattttcctctaaaagtccggtcctgagctctattacaagatagaacattttagcctctatcgaagagagcactattaatattttatggcattggctccttttttcctaatactgtgggattaaaataatgtttactaaattctggatgttcgattcctgttttttcatgatattttataatccaggccttcttcatagagacacagggctatgttttataactgccagggtcaagcaaagaacagcttgtgtgagatacttaaagaaatagctaagcagtaacttcagaccttctgtatattttcctcaaaattttctctcagtttttgtctccctacaactcatttttagaaaacaaaaacataacacaattttgcccttttaaaagataatacagctgggtgcagtggctcacgcttgtaatcccagcactttgggaggctgaggtggggcagatcacctgaggtcaggagttcaagaccagcctggccaatatggtgaaaccctgtctctactaaaaatacaaaaattagctgggtgaggtggcggcaggcgcctgtaatcccagatacccgggaagctgaggcaggaggatcgcttgaacctgggaggcggaggtagcagtgagctggaattgcaccactgcactccagcctgggcgaaagagtaagactctatctaaagaaaaaaaaatgtactataataatttacaaagtacagaaaatatctaaaggaaaagaaataacatctcacaacctcatcatctagatatgactgcaaaaattttggcatatttcatttcagcttttaattaatttatttttgcagaagacatttatttcagatattctaactttataatctgtagaattttaatgatatttttgtatgacatctatcataaacatttctgcatgtcattgaaatatttataaatgttatttttatttaaacaatgcataattgatataacccttctcttaaaattggtgatttcacatacctggggatgagccgatgtgaaacaaaagagaaagggtaagagatagctagtctcttgactcatttttttttttccatatgacttgaaaaaaagaacttatcttagagacctctagaatagttagcacaaatagatttctcaatgtggttaagatgaaatacagatactgaatttactcttttatgtgaaataaataaaaactggataagatatatatagcaacagttttcaagacattatacctcagacaacaaaggataatgacctctgagagagggaaaacaaattaggtgagcctgtgattgccccagtttactgcctggagagagattccaggccagggtgcagagagaagggttgcgaatggaaactattgctctttctgagttaaggagagagacctgaaagtctgcaggtacaaagatagctgcaattcatgagaaagagttccagagaaaagaaaactgaacagagagtgagctctggatttctgtagtgttcctgctgactcttctgctgaatcatgatcagtgcatgtgtgtggctggagaaagaacctctgaaaaggtttagagggacaaatccttagaatcacataggcctgggaatagctcctctttccaccagaaagagtataaaaaccatgaaattcatgggacattaggtagagtacttagaagggttttgcttcagcagtgagaaaaaattagtcctagaccaaatgttgctctgatcctaacaaaacttaaaaaatgagaccctaaaggataaaactgtttccaggtaacttaaatatataccagaacaaagccgaagactataggaatatgaaaatatctagcagtcagtaaggtaaaattcataatgtctaatatgcaaccaaatattaccatgaatataaagaagcatgaaaataaatacccataattccaagaaaaatcaattatacataattgccccatcaatgacacagatgatgtaattagtaaacaaagagctaattataactgccaactctagccattacacatgttcaagtggctagaggaaagatcaaatcacgacacagaagaaataaaaagacaataaaatatgtacagatgaaaattacaatatctgagatgaagcataagcgagatgggattcgcagcagattagatatagaagaaggattaatgaacatcaaaacatgtatgacaacagtagtataaagtctgtaagaaaagaaatggaaacatactggtataaggttttacactatgtatgaaatggtgtagtatcacttgaagagagactgtgactaaagaccactgtaacctcttagggaaagaaaaatatctttttctacccatcctgggttcacagctgaggccactataacaaaaaacagattaataacacagaagcatacacatttacttaatataagtgttatgtgacacagtagccatcataaggaaagaagactcaaagaaacagatctgagtatttttatagtaggtttgatgaagaatggatagtcatggagaaatataatggggcatataatacaatggggttatgatctaatggtagtaaactgggggaaatttagctgggtttgcttgttcagatttttctccttgaccttttgtcgtgagagacaaggatgtttcttttctctgggtatagggagggcacctctcacatgagggacttatgatctgcttcagagaagtgccagggaagaacagagtgaccgtcctgcttctgcagttttctcaaattcatacagcttaaaatatttaacatgctaaggtgttacattttggggtagtatatcttgatacccatcacctgaaaccaaccactttataatagtaacacaaagagttgtacataatataccataaaggtggtaaaatggaatcattggaaaagtcaattcatccaaaagaaggctgaaagaggaaagcaaaaacaaagaagagatgggagaaataaaaattaaatggtagggacatgagcatccattaattttggtatacaggaggggcttgaggggtgtcctggaatcaatccccctcagataccaaaggatgactgtatattttttaaattaagagactttcattctttaaatattcttgacttacagttttttaaaaagaaaaaaaatcaaagcatagtatagttgttaaatcattttaatagtatattcagtggctgaaatgacagggagtatcaatcattatttattcaatataaagttatccttactgaaaaaataagatataactgggaaatatgcttggatccctcacacatccacttaatttcttaaaggaagaaagatgaaacacatgtaagaacagaaacaaataaaccatttactgtaacattccaggaattgtgggatccttttcttcccaagtttatttatttgcttatctttatctcctagtggtagtttgtttcctttggtagaatatatggcagtcccacattggtgacacctggtgctcccttcatccaactggatcactttgagattcagttttacacctttttagcattttctttgtgttcatatatcagttatgatgagccactgataatattttgttctaaaacgaaacatattacttagtactttttttattgtctcgctgacttttaaaatttgagtgatgtacagactttgtttttttaatgaaatataaatattttctcatggtttctaaattccttataaaattaaattaattcaatctgcaaaaatattaaatggtaagagaataaactcatcacttagatgttcatattaaatgtaaatggcctaaataccccaattaaaagttaaaaatggtctaattgaataaaatacccatatccaactatatcttgcctataagaaaatattgccacttgcagtataaaaatacaaataggtaaaagataaaaggatggaaaaagacatactattttaaactaataaaatattaattaattaattagtcagatttcaggacctttttctgaataattgatagaataaacagacaaaaatatcagtaaggatacagaaaacctccaaaatattatcaatcaccttgaattaattaatatttatggggccaggcttggggctcatgcctgtaattccagcactttggcaggccttgagctcaggaattcgagacaagcctgggcaacacacacacacacacacacacacacacacacacacacacgtgtatatatatatgcacacacacacatcagctaaaagcagcagaatacacattttcttcaagagaacacagaatatttagcatgatatgctatattctaggccataaataaatctcaacagacttaaaataattcagctaatacaaagtatattctgtaactacagtggaattaagtttgaaattaatagcaaaagatatctggcaaatccccaaatatttggtaactaatatcatacttctaaatgacccagggtcaaataagaaatcaaaatagaaatttgaaagtgtttgaactaaattaaacacacatttcaaaacttttgagatgcaacaacagcagtatttagaggaaaatttataatagtatagacctatattagaaaagaagatctcaagccagtgatctcagtttctacctgaagaaactagaaaaacaaaacaaataaatccaaaataagcagaagaaagtaagtattaaagaccagagctgaaatcaataaagtagaaaacagaaaaacaaaacaaaacaaaatttaataacacccaaaacttgttattatacagatcagtaagattgataaaccactggtcaagactgattaggaatttatcaagaagaaacgatttcctttttttcatactgtatatgtagcacccaaaaataaataactttagtataacatttattcatctaatacagaagacagaaatgagaaaagtggcatcattacaaattctacagatagtaaaagaacaataagataatatgataaaaaactcaggccaataaatttgacaacttagataaattgcacaaattacttatatgacacaatctaccaaagttcattcaggaagaaattgataatcttagtagctgtatatctattaaagaaattaagttgatagttaaaaattatcctacaaaacgtattccaagctctgactgtttccctagagaattgtacccaatatttaaggagaaagtaattctaattctgcgtaaacttttctaggaaattgaagaggaggaaatatttcccaactctccctgaggccagtgctactctatccaaaaccagaaaaagacattccaagaaaacaaaactacagaccactgtatgcaagaagcaatcggaaattaaaaattgtaaaatatcatttaaaatatcagaaaaagtaattatgaagtacttaggaacaaacctgacaaaagtggctcaagatttgaacactgaaaactataaaacattgctgtaagaaattaaagagggcagaaataaatggaaacctcatttgtgaattagataaatttaacactgtgaagatattaattttccttaaattggtctataattcaacagaatctcaatcaatacctcaataggcttttaaaaatgcttgcaaaatttgacaagctaatcctaaaatttatatgaaaatgcaaaggacctacaagaggcaaactatctttgaaaaagaagagtaagtttggaagacatatacttgccctcagagctcattataaagctacagtaatcaagacagtgtgagactgaaataaagatagacaaagaaagacaatttctaggtcatgagagttatgtttcctaaaggaaggcagcagatgcttattaactttccccgtgccctcaggatgccttaaacagtggttgccaaccactagcagctttagcaccacttggaagctttttagaaaagctaattactgggcccatcccagacctactgaaccagaatctctgtgggcaaagcccaggaatctgtgttttcacaagctctccaggtgataatgatgtccattaaagtttgagatccattgccttggcctttccctgctagaaatcctccaggatttgggagacaggggaagaggtctggagagagtggcagaattcaacaccacagaatgaagaggaaaattgatggtctttgtccatggaatccattaaaatatactctcattgctgccaggctgagctgatgaataaaaaataagctaatctcaaatcaagccatcaggctattgatgataattgtgttttagggtgagcaaacagctttaccaagctcacacagttgagacaatttgttgtttggaactatcttactgtaagatccttaagaagaatgcagaagtatgaaaataaatccaggactcagaaatctttcaactaaatctttaaaattctctctctcatgcacacacacacatatgcacacatacacatatagtaagatttcatgacacatgagacaggatgtgaagctgaacagttcgatgaatgcctgagtggtaagatcaccttgaagaaccagaagtgagggtctattctagctgggtatgagctacaaactcatttcttggggaacacatgaacacatcggggaggctaagtagcttctgaggctactaatagaatttcagtcatttctcctgtcatctgaaaaatatatgatattgaatttctaaaaatgggtttagtgtagtctagtcttactgtctaaaactaagatgtggcttattccaataaccaaagtgattccatcccatgtgagggaaaaaaaggataatggtgaattaaaagcacctgcgtgtatttgttgctcctttagaggagtctctcttcatcaacgttaactttctttcctacttttgatctggctgctaaaagtctaggtttagatctcaaaccattgtccttctctgcatgatgtaatagttacaattacagtctcaaccctctggcatttaatgaagatgaaattgatttctttagactgaaaacaaaaaaatcacttacaatcaggatactgaatatggtagcaagtacaaggtcccagcttctagtagacttggcagactgtcaagctcttactaagtgaccccaccccatgcctttttgtcttttctgttgccacacaattacaataatttgttctctgaatgccagagtactgacaaggaaaggaattctgaagctggctgagagaagtcgtgtaaatctcccaatctaggctccattgactcttgtctctttctttgtatggaactgattttataatttctgtggcaatgaaagactagtacccaaaatgactgctggtcctttgtttattgatcaatctgagcatggactagaattcatcctccaattggtaacaagaaaaaattggatggggaagcataccattggctaaggcagcacagcaagtttgaatttggctgcctcttctttcaatattggttgacatcatcaagagcagacattggcgttggagttaagagtatcaagagagttaataaataccaatttagggtaatattttatgcctagtctttatcttttggtgaagtggtttctaatatcatctcagactaaatcttatgggatatttctacttgtagatgctaaggtattaagaaaaagctcaaagtagttgtgttttccttatcttcctaaaagtttagattaaagatgccaaaaatttgtgtgttggtatgtgtcaaagcatttgaatgcccttgtagactattaaaacctttgttctgtaccaggcactgtattgagtatattgcatgtatttattattatatttagttctcacagcaaccgtacacaataattacaattccttcctttcactaaggcatagggagtttaaataaattagccacagtacaggatggcataaaactgtagcagagccaaaactcaaacatgtctctgtctgactcaaaaacataggctcattctcctagagccaggcaacaacctgaaagctcttgagttgacttttctagttctgtggatgaatgcaatcatctcaggacccagataaacagaagtccttctttcttattcgtatttctcagtactaggccagtcaggacaaactctgttctccatggccgtgatcttgaagaaattgagatttcatccaaaggaaatcaggtattgaaacgtgtgtttatgtgtattgattaatcttctgcctgtttctggaaacatttgaagaaatataacaaaaagcaaatatcctgaaactgcctaatgaacctgatctctctctctgtctttccctttctctctcataggtcttttgcctgtatttctctggtggaatttactaaataattatatcaggtgtcttcttattgtacttgactgctttcatcaaggtaatcttgaggacagagacttcctttgttagccagggcactctaggggaacagaaattacacacacacacacacacacacacacacacacacaggaactggttcatggaggctaaaaagtctcaaaatctgcaggccaaaggcttgagaacccggagtcctcattgtgtaagttccactcagagtctgaagaggggagaagacagatgtcccagctcagagacctttaggcagagagagaaaattctgtcttgctcagcctttggttcttttcaggcctccagtggattagatgaggctcacccacataggggaaggagtctgatttcctcagtctaccaatgcaaaggttaatctcattcagcaacatcctcacagacacacccagaataatctttcaccaaatatctaggcactttggcccagccaaatagacacataaaattcacttccacactttcttactaatccgtgcattctctccaatacagggcacccggcctggcaaggagtaagtgctccatatatatttactaaatgacaagagatgagattatccttagactatgactcagatatagacaatcaattattaataccctatcatttttccccactctgacaacccaaactgaaaaatgttgggattgccttttttgacaatatgattttctctgaatgcagactcatgttttgaccttccctgtctgttcctgtttagtattcatgctggcttaactcattgattgatcaagtaaccattgagcatctgccgtgttaacactctgaacaagatcctgtaatatgaatggtgtttagcctgatgaataaagtgtggtgtctgtgcattcatttttatatatttattgtttttaaccaaactttacccatgtaaagaataacattgatggcaggaacttgaatttggatctacgtacatgttccatttcagactcaccatgaaatgaggtgcttgcatttttcattgctgattttacaatacactttcacaccttttgggtaaaattttgcaatcaatgtaactgaggcagcatggtatgaaagcaaccctggaggtggaaatagaagactagaatttaaatcttggttatgccacttattggttgtatgatttttgtcaagtcatttgacccgtgtctattcagagtttctttgctagaatgaaggagttaactagaatttattgatctcagtagtcagtctcctcaggcacagataaatcttggatatgtatcctgagatagctttcccatttccacattgaagacaacattctattttagagcaaaaatgaattatattatttaagaatatgagtttcagaattcagactcatgcttacgggtttgaattctagttctgccactttcttactatgcagactttagcaagtcagttaatgtttgtgagcctcaggtttctcaccagtaaagcagtgtgagtaataactatcatattatattattacaagcataaaatgaaataagagtacttggcacaaagaaggatcttaatttttagctttttaaaaaagctgtatttgtttatatgcagtatgtatatatatattctcaattctattattatagactatatttattatgtttttcataaagtcattagtttcactcaggaattagttgacccttgtgagatacatggtttgaccacttttcactttgatgttcttcagaaaataagacaattagaaatctctgattgtaatcttcatgtaaaatattttacagtcatggctaaaatgatcccaggagtggaatcatacacataaattcttttctttattctaataatgttacctttagtgtctatgccaagcaagtatgttatgtgttgagataaaaattcttagtatgtttgtatgtgacattcccaactcccatcccactgaagtctatatttacctagtttctttcttttgttttcctctaacattcatgctattttaatcaatgttctttcattttgaagcccccaataagtttgaccccaaagactttcagtttgcccctgctattcataagcatacttatgacaatgcatgtctcccattcttttctcatatttacaccgatctttttattgggacaaatgggtttgttttttcatgcttgtgtttaatatctcactgagttcagcataagttattaaacataattttctgttttctctttctccctcaagactttctttttctctagacctttatttcctaactccagagtatttgcccaggtctataggcccctctctcttttgctttcttaccaacccatccaccttcttctgtttcctattgcccaactggcttcacttaaacaagagcatttgttatttgtacagagtgcaacatataattgtcctactctgtttggttgctataacaaaatatcatagactaggcagcttataaacaacagatatttatttctcatagttctggaggctggaaaatccaatatccaggcactactggcagatttggtgtctggtgagagcctacactctggttcatagacagccatccatttgctgtgtctccatatggtagaaagaatgaataaagtttctggagtcttctttacaatggcactaatccattcatgaaggtttcatcccatgacctaacaataccattgtattgggggttatcttgcaacatatgaattttggggaacataagctttcaatctatagtaatgaagtaggaaattttccctgatcctttcatgggcaggaactggagtatgcctatttcacagaggtcttatcagataaaaaaattctccattaaatggcaaaacaagtaaccatttgggattcctgggtgtacagtgcctactattccaaaatgagattattgaggctaacatgaccctttgtatacaaagacgggggcagaaataatatttctagcaaatccacacatctcaatcacatttaatttcacaaaatttacttctaataagcattgttccaactaacaaaccatctggtgctagtctaagatagagatggctgaagtgctcctgattccagtattttaggtgttaaatctccattctaacattgtcaatccttaactggagtactcaaatattaactaacttcctctaggatataaattaatatgtataccacattctatgtgaattattttaattatattacatgccatatacaaattatatataggtttagtcttcctgaatattgcaagttgagtctgtgagagaaaaaattaggatgaattgagaataactagaattcagaattctttttcattaagtgttgactgtgttaactcatattcccggttaggtagcaagtcctatgaagtgtgattttctcctaacagctaaaaagcagaaaaaaaatggatttattctagttaatgacttgctttttctatttttatagaaaaaatgaagtaaattatttcacttttcttgatgctattactattttgtcaggaagatagatcttctaaattttaggaaactatgaatctaagttctatattgctctcatttcctttttctctttgtctctcttctgttgtagcccctccctcaccgctaagccttcaccctgactctaccctgcccccactgccttttgttctttggaagacactcattaacatttgctaatgtatgctaatgagcaataattagcatctctaatgtgaacaaaagcagtgctacaaaggaagggtaaagatgtgtacagagttcagccagccttttatgcttctttatgccttaggaacaatcctcttctttcagttctttcacaattctttagtgttttttgtttgtttcattttgtttgcttatccatgaaccctgaaaaccattcttcttcttgagttagaatattgcaaaaatgctacggaggacagaaagattcctttttgtcctaaataacccaaggatataagcacagctgctaagaggttataatgcacatttgtattttcatctggttgttattttggtatcctattactagaaaaggttttaaccagaaaacctcacacaagataatgtatttcattttaccacacttatttacagtggttgccctttatggtggtaattgcaatgtgaaagcatacactctgaatatatattatgacagcatggttaaataagaaatgttccctccctcaaacaatctaaatgcaaagaaaatgcaagactcaccacttactttttcataaccacagagggctctaaatgtctttgtaaatagctatttatttattgaatatgtatagttttttttttgaaaaagccagccctccaaaccacatagagtaagagctgtttttgttctttctgtagactgatggtgtcgtgaaatacctaattgcagtttctcacaaatactccagcatgtaatttgccatttgcagaaccaggcttcacatttcatatttgctcttccagctcaggggtggtagaatttggaaacataccagcaacccacttcactcagcctgtgtttaattataatttcacgtacaataaaagcagaaggaaaacgtgcaaaaaaattggtgtgcatccctttcccctccttcttacgtatataaaaaagatttatttccattgtaaaaggatagaatggggatctttattttgagtagattttctatttttgttctttctgtttgcctcagagttagtgtcctctctctgtgacctcagagtaaaatgtgtttctccataggcttcatcctgttctatttatcaactatattatatttatcaattattttatattgtgtttttaataaagcagacatcagcagctatttattttctacttctgagggcctaaagagtctcagaaaatgagtgtaatctagaagggaaaacattgaagagtgacagctattataacagttgtgatttttgcctgcctccctcttttggattggtgagtcctaccaaaaaccaaaactattattctccttgtaattttgaaaccacagagattgaaaataactatttagtatctccaagatattataatgtttgaaaatatgaccagttttgggggcatttattacaaaagtttccagtagggtgtttttgaatgtctgtgccctctggttttcacaaaactggtcttaaggaagataagatactggtacacacagaagaaatatcagcctacgtctgtctcattaaatcttatccccagatactttgatgatatttaagtgtaatgatctcattctgtgtttctcactcctgataattttttaaatgtcttatagcttacaggtttattaaggtatttgatttatttaagaactacataattattctcttcattcaatggcttctgaaatattatgtttaattctatcatttgaaggacttgggattgttataaacaaatggcacgagcttctttttgtcctgacctagaagtagcaaagataaagggagctgcttagttaacctgagtgagatttaataatcttgggtatattttattctagagtaagaagaattgcaccctattacttttattcagttttgtatgcagtagcttctgttgtctacttcacaaccaccaatagtgttatcataaattcagagtgttgggctgtattagcccattcttgcactgctataaagaactacctgagacagggtaacctgtaaagaaaataggtttaattggctcatggttctgcaggctgtacagaaagcatggctgctttctgctctccagcctcctcatggaggcctcaggaaacttacaatcatggcagaaggcaaagttgaggaaggaggtacctcctacatggccggagcaggaggaagagagagaaggggaaggtgctacacacttttaaacaagatcttgtgagaactcactattccaggaacagcaaagggaaagtctgcgcccatgatccagtcacctcccaccaggcacctcttccaacactggggattacaattagacatgagattttggcacaaatttgaaccatatcctgggccattctctatatggagatgatgcctgaatatgatttggtgactcagtctagcatccaagtggctcattgttgggcaattcttctttagtcttctttagggctaattttactcattccttttgaaaattggattgatttactttttgtttggttttaagaaagcaaaatatctaaatgctgttcttggcatagcttatatacatatacatgcatacacatgtgtaattttcttcagatcaaaatatgcatccccatcattcgtattgctataatcagaaattagtaatttgaggggcaactgaatgaccttatacctagagttttcagagtataatattacacagtgtgtattcataagaatgctgccttttaaagaggtttttttttaaaaaaatcatagcttattttttatagtttcactggtctgtcctcccttttctctctttttttcccccttgagaagagagatttcacatttttgttaaggggctcataatttccttatgaaatatgacaaatttcactttatcttaaaagcaaaatattaatagtacagacagctgaaggtggtctgagttaacctgagttacacattttatatatatatatatatatatatatatatatatatatatatgttaaaaatatttatttgtcatatgtagcaagactaaaatgcaaaattttgctttatgcttattcttttccagtatcatttactgtaattctcaccccatatttatttttttacttctctttctgtttctctcctttctcctctcattctttttctttcttttcttctccctaccccatcttttagttccatacttttgaattgctatagtggactcaaatctaagcaagaggtatattagtaagttgttcagtcttttaacaaagtatcagtcagagaagcacagcccagggataaaccaaaagcagaaataaaactgaggaattaataatctaattcgtgttgttttctttacattataggtggttcatttcatagcctacatcttcaatttctcaattctcattagatctttcttaacagcatataagaccattctaaatagcaaaaatagctgtatccttttactcactgcccatcagttcataaagccacttgaattcagctttttgcccacacaactgcactaaacatatgcctgccaagatcatcaatatctctacattgtcaaatccagtggtcaattttcagtccacattgtacttagcaacttatgatacgtctctgatgcacatcttctgccatccacaatctctgactttccttctacttaagagctgattgttcatttttgatttcttcagtttgttcttctcctgttcctcaccattttgagtctcctttttctgttttgtttaccctcattttctttgttatctcatctggtcttatggctttaaatacaatgtttttgctgataattccctaattcatatttccagtccagacctttcttctgaactccaggctcaaatattcaactgcctacttaatgtcatgcttggatgtctagacagcacctgaaatccaacggatctgattaaagtcctgatctttaacagctcctacctaagctattctccctacagtcttccatcttcttttcctgtaattccattcttcaggtgctcaagcaaagaacctgttgctatccttgatttctctatttctctcacatcctacagggatgacatgggttcatttatgcctgtcatgccactgattaacatccctatcaagaaagtttagtctgaggtaaaaacatccaatttgtatgagaagggccaacattgacattcttcgtacacaaaaaagaatcctgagaagaaacacaaaagagctaaataatacattgctgttgcagcttaggtaggctggagaagaaacccatacataatctcaaaccttactgttataaagtcattcttttttttttttttttttttttttgagacggagtcttgctctttcgcccaggccagagtgcagtggcgctatctcagctcactgcaagctccgcctcccgggttcataccattctcctgtttcagcctcccgagtagctgggactacaggcgcccaccaccacacccggataattttttatatttttagtagagacggggtttcactgtgttagccaggatggtctcgatctcctgacctcatgatccacccgccttggccatttttttttttttttttttaagagggagtcttattctgtggcccaggctggagagcagtggcacaatctcggctcactgcaacctctgcctcccgggttcaggtgattctcctgactcagcctcctgagtagctgggattacaggcgcctgccaccaagcccagctaatttttgtgtttgtagtagaggcggggtttcaccttgctgtccaggctggtcttaaactcctgacctcaagtgattcatccacctcagcctcccaaagtgctgggattacaggcgtgagccactgcgcctggcctataaagtcattcttttgcatcaaatagtaagactcattaaaggcagtggtattttcttttactgtctacaaacccttatccaagagcattttctctatattcctttgtgagcacacaataaatggtaattcaataagtgaattttcagtttccaaaataataacctggagctataaacattgcttcaagaagtaaatgtgggtcagagaaaaaggcaataccattcaactcttctggccacttggtcactgtgttatcctgaagaagcataaactactttcagcattatagatttaaaaagaagccccagaacaacatccacttttctgaacgactcctatgcctctgaaatgtgacattttgctgttgtttctttttactgtttttaattactgagtctatctgcatgaaatgaggatctgggttgcctaggagttcatctgctcctattgcatattcctcttttaactacacatacttcaatgcagttttgcttgctgcctccaacattttgacagacttcccctcctcttccttcactatcctcccatcactctccaggagacaaggttatttttaaagtgcatgatcaatgggcattggggagcagctgaggcatgaagagatcatacgattgggaataaggtactagggactgctgagagaaggaatggcaacatgccatctcagacattgtctgagaaaggaaagggtttgtagctcccattcaagtattctgagctatctcttcacacaggtttttgtcttggagggagttcttaacatagttctttagcattgctttaagttgaaggagatataggccagtgctgatagttacttttcaggccaaataatgttccattaaaatcgagcttgctctgaggatcttggtagtgtcttaaatctcctggtcatagtgctgctatttggttcttgatgcttatgacacctttgctgagggtttgaatcaagaacaaaacaagtattatcacaatgactataaaacatgactgttccacgatcagacaaaggaatgctgttaagcaaagaaggcacctaaggagaatgtggagatgaccatgcacagaccagaatcactattggaaaaccaactcaagaggagggactgggtcatttctgcagcagtcttcattgcatcactgagaaattgcagctctgttttagttctctacttgccaccacagggaatatcttcccttatggacttttaggttttatttaatggttatttataaactattccttctgtgccggagaagatgattcatgactctagccctgctttttctctcccgtggttattagaggaaactgagttgttgcttatctctttagcttgggataccttattctgctctttttatttaatatataatctttcctaaagatttccttatatttttgttcatttagtaggtttttctgttttatttaattaactttatattatcacattctagtgaaataatcatcacaaatcatcctaatacatcgtgcaaatgttttaaaaatgtgctttggttgtgcatatcgcaaagtaggctgtgggtcagcatttgctatttgtcctcagctgtttcttctttatatataactgataacaccctgctccaatgttaatcttatatcattaaaattctttcctagagaatccttctttgactgaagaagcttagtggtgacattaattgcaaataaaagaccatgacctattgtagaatgtggaatatctccttagaagtgtctgccttcattattgcaaactttcagtagtgacataaagatctttgtcctgtgtagtttcagttgcagccagcaacagaaggcatatgttcactttgaacaaaagaacatttattttcacattctgtggctgatgttgagtgataacatttttgcatatcctaaaattttttacccagatgctgtttaaaggcaaaaagtgcttttacaataatattctttgtgaatggaatttacactcttggcatgtgttgccttttcaatatgcccatcaagttctgaataataacctttgacagtgagtgaacagaaacaaaaccagaggttgtttcatctgttcacagcaacactgtttgtcatctttgcttttttggaaaaatgtcattccaccttaaataaaaatatgataaaattcatgttttataagcaagttaatagacttcgattattaagaaatattttaatttttccaaggcaagaaacctgtgatgaatgaacattaagttgacaaaagaaaaaaatatgccaataaatatattttttcatattactgtagtgtcaaaaattttataaaacttttatatgcctttataaaaatgaagcaaagctaagaagaagatgctgtatgtgttatggggtgaggaataaacagaaaaagtgtcctttgtcttggaaagaactgtaaaatcacctatctccatgttgccaaagggaatcacatattgggaaatttaggctatattaatataatacgtataaaaataattgaaatagaaaagatctggctttaagcatttttctaaagactttttcatgcttggtaaaagtgtttggaataaattattctctatttttaagtagttaatttggttattaacctaattggtatgggcatgtggatatagctttattaacaattcaatttctcatgaaataaaataacccgacaaaccccaagtctacttattgcaatacagaatttattttggttgaagttattttgaattgagctgatagcttataactttgaattgggcttataactgttatgttttgcaaatccctgaagattatgaaatagaaaaatctttgcatggcattgtataagatgctgtagctgtatatctttaataaatcgtgctcattttggcaagtttatggaaaaattgtattaactgcacaaaaacattatgataaaaacaataaaagtaaaaaccacttactaacaattgtacaggcatttaaataattgctgtactgttttctttcctcaacagtacaaatcaaagtggaggaaaaagaagacgagactgaggaaagctcaagtaagtggtgatgggccacttgggatacatttcctatggaataccagtaaactcaaagaatttatcctcttgtggacttgagctaccatatgtaagcagaagtgtgtgtggataacttttcatggtctcacaggaggaatcaagttcagcaaacagaatccccactctagagtctatccagttggcactataagggccaagactgtgttcccttgattgcttgctgaaaaatcaacaagcaaaagacatgttaataggagaaaaggcatataatttcatagaacttgtattcattaaagccttaggatgaagacccaaagatagagaaaattgtccatttttatgcttaggttcaacaaagtgtggatagcagtgtagaaatatgattggacgaaaagggtataatctaatgtttacatagagtggggaaacacaacaaggcctgtctgcctagattcttcttggcctctctaagcatgcatttctttcttctgggtatggggcagggaccctctttggaatgagggtcttatgatctacactcaaacaaggtaggtcggatgatttcttgatgaccagtttttacacagacagggcagagggaatgttagagtagtatttttaggtttcatgcatttgagaagaatgtttattctgttgttattgggtagaatgttctgtatatgtctgctaggtctgtttgatctataatgttgttcatgactgctgtttccttattgattttctgtctagatgttctatccattatggaatgtaatgtagggtattgaagtttcctactataattatattgctgtatattttctctcttgagtttggttaatgtttatatttaggtgctctgatgttggatgcatatatacttataattgtgatatcttcctggtaaattgacccttttattactatttaatgcccttatttgttgcttatgacagttttatactaaaagcatattttgtccgatgtaagtatagccacccctgttcttttttagctaccatttgcatggcctatcattttccgttccttcactttcaccctatgtgtgtccttaaatctaaagtgaatcttttatagttagcatacagttgtttcttttctttggtttcttttttaattcattcagccactttatgtcttttgattgagaagttcaatccacttaaatttaaagttattattgatagagcaagactaacttttgccattttgttcattgttttctgtcttaaagctcttttgtcccttttttatctcatgttattctccttcatattttattgatttttattatagtgatatactttgattcctttctcttttcttttgtgtgtcttctatagaaattttattgtggttaccatgggactcatgttcaacatcttataattataaaagtcctattttaagtagaaaacaatttaacctcaattgcatactaaaactctacacttctactttccttgacacttaatattattgacatcttgagttacatatttttatattatgcatccattaacgtatttttatagttactgttaatacttttttacttttataatacaattaaaagttaccaatatactgtcattaaagtattatagtatcctgtatttgtctacatatttacctttaccagacagttttatattttcatgtgattttgtgttgctctttagtgtcctctcttttcaacttgaagaacttcctttagcattacttgtaagaaaagtctaggggtgattaacttaggttttgtttgtctgagagtctttatttctctgtcatttataaaggacaaacttgctgagcatagctttcttggttggcaggtttcttctttccaacacttttaaaatatcatcctactttcttctggcctgcataatttctgctaagaaatgatagtcttatgaaggtttccttgtacatgacaagttgcttttctgtttctttcaaaattctgtctttgtctttgacttctggcaatttaagtataatatgtattggtgtggatttatttgggttcacataatttagggtctgtgggcttcctgaatctgagggtccattttctttcccagatttgggaagattttggttattattttctttgaatagtctttctggccttttctttcttttattctccttcagaactcccatagtgtatatattggtctgcttgttgatccctcataaaactttcttgactttttcttattctttttatggttttgctcttctaactataatttcaaacatcctatttttcaatttggtaattctttcttttgcttgatcgagtctgctgttagacctctgtagtgaatttctgttactctattcttcagttattgtgttcagttattgtcttgtactcttcaatatttatctctggttatttttatatttttatttctgttgaaactcatactttgttcatgcatttttcttctgaatttgttgagcatctttatgagttatttttaatagtctgttaagtaattcatatatctccattatattagggctggtttctggagctttatcttctgttgtttggggtatgttttcctgtttctttatttttcttgattttgtttgtttgttttggtatccatatattagaaaaaacagattcctttcccagccttcaggagaaggattagccttgtacaggagaagagtttcaccaatgaggcaggccagagattcttgggcctctcaaacatttcctgtgtatgcatcgtctctggacttgtgtgtgtaaattctcaataagagggatttttcagttgactttttctttttaagaattcataatctcttgttccctccagtgtccttctgtcataacatgtgtcttctgaggaagcagcatgtcctgagttcttttttttgtttccagtagtccccaggcatcaacagtatgctgggtcctgtccatgccctgagactggtcattcccttaggcagcctcctgagaagtctgaacacagggtatatatttcagtcttttatttcccatttcaggggcaagtcaagggctggaattcttgccaactgtgtcatgctgaactgggggaaggggctctggtgaatgagtacaaactaattcaaaacttcacctttgttctccatggccctgggccatttagaatatgctgggtcctattagtgctctaggagacaagtgggacagaagccagtccagtcattttttagaaaagttggagtgttagatgcactatccaactgtttttctccccagagaggtgcagatttggtgtttatcatctggttattctgtgctaaattgggggagtggctatttgagtgaggcatactattcaaacggctatctttgctctcattggttcctaaccagaggtcttttcctgtcagtgctcagattctggcaagacagaaaccagtcctttgggaacctccagaaaaatcagaatgttgaacacatggttcagttgttttctcccctccccagggagagactgggagatgatggttttctcccagttgtatggtattgtgttagcagagagggattatggtgtgagggtgtgtcagatttttctaccagctacctagctgattttgtgttcatctagggttcaggcacctttcaactagtttccgaatttctcacgaagggagcttatctccacattgtagttgaacttttatgtccatggagggaaggcgggtccagggcttcctattttgtcatcttgttgatgtcatcccagtagtttagttttaatacaaaaaatactaaaattcagagtaccaagtagctgcttgggtttgtgagttattagtgggtaaattgtttcttgcctcctgtcaagtttttgtcctttctttaattagtgactaatgtggctaataaaagcagggtaaatattcagaatgccatgatggggttcaaataacatacatttgccacaatattaaacaaacagaaactcgttcttgatttggatgacagaatatatatacagttttccaagcccagttagaaaagttattatgggccgggtgcgatacctcacacctgtaatcccagcactttgggaggccaaggcaggtgaatcacttgaggccaggagttcacgaccagcctggccaacatggtgaaaccccatctctactaaaaatacaaaaaattagctgggtatgatggcgcacacctgtattctcaactactcaggaggctgagacaagagaatcgtttgaactctggagctggaggttgcagtgagccgagactgtgctattgtactccagcttgggtgatagaacaaaattgtgtctcaaaaaaaaaaaaaaagtgaagttattctgttttttactctctgctacctgacatttagtaatatatgtaatatttagatcttatacctgaaatatcaataaaaaagttttaacaagtggtaattaaagataattttgaaaaaataaaatgatgactcacacgtatgtgaaaagaacatatttaactaataaaacaacttgtgagatgctataatcagttcaaaggaacgtccaaagaatagatacatttatagataataaatattgaaatgattgtacaaatgaaggcaaagttgtttttgaaagggggcttgtctctcctttggaaagagttcatttggatgtctacagataaaaagtgttttgtattgctatatatggttatgtataattttcaaagttgtcatatagttctcataaaatcagaatcagataacacagaaaggtatgctgcagataattcatagttttccattgaaatataattttttctctggggtagcctctatttaagagagtaatgataactgtaatatttaattttttacagtagtttatgctaaatgttagaagttaggagcaatagaaatgaaactggaatagtaatgttatgttataaactttgtgaaggaaattttatcttaattatcttaatttatcttaattatctctctattctttacctggaagcatcctaaaaagttatgaacacatgaggcattcattgttgttgatgatgaaacaaaataatgctgtcattattctcaattttacattaaatttatgttacctatttctattcataagaaataaatgatcaagcaaatgtgtatactacttttttttttaaagaaaagaacaaaaatattgaggaaaaaggagaaaaatatttagaatcaagaatgaagaaaatttaaattgagaggaacctcaagggttgaatgaatttctccaaaattattctagtttgtagcacctctttaacgttcctcttctttgttctaagatagaagtagtaataaatatgaagtggttaatcactcaacaattatgtaatggaatggtaatctctaaacttggacttatttgaatggtcttagaggtcatggtatgatattaaccaccaagctatttagttactcaagtaaatgaagaccagaacttcttcaaaaacttattaaaatttgggaatccacattcacctatttgagtcggtgaaccacaatggaaatggaaatctagatacatttatttaaatgatgggctatgaaatatgtattccatgatgcatcccatcacgatgtggagaattgctagactgtgctgtcagatgtgtaataatagttattaaaaactaagaataagcttggtagtgggaggaagcactttctgacattactcattgaatcaagtgctatgtttaggtgaagaggaagaggaggtggaagataagctacctcgaagagagagcttgagaccaaagaggaaacggaccagagatgttatcaatgaggatgacccagaacctgaaccagaggatgaagaaacaaggaaggcaagagaaaaagagaggaggaggaggctaaagagaggagcgtaagttagttctgatattctttcaaaagttccaatgctgaagaagatcactcctttcagatactctttgaccttaaaattggtaattaaagctacttttagaaagagagccttaatctgatgatgctattttattctacttaattaaatgtattttaatggttaaaatagaattttaaaatgaatatatattaaaaatggaccatgagaaattctcttatgaaggatctgaattatcataggtcgttgacatattacagttaatttaaagattttaaaatttccccactaattgtatgcattgttatctaggttaagtagaaactcctaaatagtgagcaaacatcactttatcttacagagcaggggttggaaaattatggctaaatccagcccaagaggtaagaatggtttttacagcttcaaagggtcattaataaaaagcaacaaatatgggacagagttgtacatctcactcaaagcttaaaatattaactatttggccctttatagaaagaaagtgtgctagcccttgttacagaggatttgggttgtcattttctttttaatacaactcaatatcttttagttccaccaggaaaacattttagtaaacgctgactttgtgtagaataatgcattaaatgctgtttaggaaaaatccaagaaaatacttttcttctttttgctttttggaaatttgcagatagcaggcaggtaggaaaaatgtacgtgtaaaacacctctaattaaagagaaaacctagaccccttggaaagaatgcaagagaacagccaacctgttccacaactcacaggtaatagggccatgcgagtcgccatcaggtggtggaatctcctccaaacactcctaggactttgaagcatgaggaactttctaagatgtcctcccaagatgacacacttctatactcaatagctctaactattgtgttattccttataaatgattgtcattaaaaacaactgaatgaaaaatttgtcaagtagagaagcttagcattaacaaaaaatggtttcttttagaataagaataacaccatctacttcatgtctaagttttcctcctcctcttccccagcttttcctttctcccttttgaataccaagacaaaacttgcttttaaattttgactctagtattttttatttatatctgcttttaaagtttctttatgctttattcctttcaaaaataaaatgcaacacattttatgtcccatgtattactatgattgttagttccattattatgtagtaatagttcctatttagcaaagcttatgctttccaacagtggtatttcattgagaaaacatctccaattgatgtatgcatgatataggttgtgttccaaaatttgcttttcctctctatttatgccgcaaaaaaatccttttaaaaagatgagttggacaggaattcctctgctctcttcgtctgctgatggccctcatggcaactgctcaacttctaggaaatggggccatgtgaagcaactggatcctgtggctatgacagtgtctcttcctagctggcctcactttcattttgatcttgagaatcaagatcccttacctcccactcttccacataacccaactctctccataggttttgcaaattgtatttttgctgcgacaatttgtgcatctattataaatagtatcagaaattagttgtgattattgatagttctgttctctattttagagtctattttctattgttcattttgaagataaacatcttttttttaaaagaaaatcttagataatatttttgagaaagattagtagccaaatcagggcacatttatgtaggttaattaattcagggtattttttatttaactattcaagtaatgcctcagggaatttcccttgcattgacacaacatttgaaaccaactaaaaccaaggttgtaatgctaactatctttggaggcagttaaaaaaacactgccttgttagacattttggagtatttccagtaatattacaggcttttcctgacccagttttaagtggataagtaatatattcatagcagtgagaaattcagcatattatgccttcttcttcctaacaactgttgtttaaatatatcaaacttaagatagaaaaccattcttgcacagattagcctgaaaatttagatgaggcatgcctatgccttttaatatgattagccctttctttgagtgattctagaaaagcaggtttcctgtaatgctgattagaaaagtattttaattaccttcatatttgagggtaacttatgtgtcaacaactgtaccctgtaacacagcctgatcctcctggtgaaataaacaattaacaacagagacttaaaagatataccaatctggggtcatttagtacaggaataaacgtctttccataccataataatctcagaggtagttgttatattttagtgtactttgagcactgggtttatgatgataaccctgagcaatccagaaaagttttgtatacatatgttcattcaataagttatttacccagctctacttttgtgcaacctaatttgcttatatctttgggatacttggatatgaacatgtaattgcccacaatcttgcaatcttcaaaagtccataatatagtaagggataggccacttagatacaaattattatgacataagaaagtatatgtgtcccagagaaatacaaacaaagtagcttggagtctcagagaagtgaaaactgttctcacagggatagttagaaaagggattcttaaagacatttcatatgatttttaaaggacttgaaatttggacaagctgaacttataaactatttaattagtattagaattgtttctattaaagggtctctgaaagttggcctgtaggtttagttacctggcaaatccacacatcaaatagataattctttcattctttggtgatgttggattagagatgctgttttacatgtgattcttaatggaagttcagtagtgtaaagctttaaggtaattatatgtaaatatcatgaattattttgaaatggttggcaagttaaaggcttaacatatcaagcaattaaattattaatcataaagattttttctaattgactttattactgataatttcttgccatctgttttattttatttttgctagtttctgaaaatatttcaataaaactgctatctatgtaatttaaagttattcctatgtttgcatggaaacaattgtgatcattttaattaaaacacatctttacctcctaagacaaactaacccacatatcattctaattggcaaattaaaaaaaaaaattgtggatatagatagagtaaaaaaaatcctgaaatattttatgccatggctacacagcatcataggcttttatatgataaacaccaaataatgaaaatagaaacaacccaatggctatcagagatgtatcttagaagagtgtacttccctggttctcttgaaccaaaatgattattctaagcaaaatgtttgaattgtccaaaaaacaaactgtcaataggaagtgttattttaaagggttaatatgaatttttgtttcagtaatcatagcatgattaaaaactataaattggtggcaaataaaggagattgaaagtcattttgtaaggtgaactataaaactgtggatatgtccttttcctcaactagaactttaaaaagcagcttttgccttatttctactgtatctagtcataaattatttttctgagtaatactgaattggattacaatttttgttattggtcaatatctagtgaggggagaaacttcaacagttaattgaacagagagaatttaataagtgaattgttaggaggtataaatgttaattagactgcagaaaaggtaaaaagagaacactaaagtatcatagtgacggtaactactggaagcagctaccatcccaagggctggaggaacaatggaaagggttgaaacgaaaacactgtagcgtagaggaaagaccctaggagctaaaactcaggcctctgcagaggggctgatgctctgtggtgctggtttctgtgggagaggtgatgaagctggttctgctagtgttggtaatattggtgataaggattcacttgcagtatggcaaggacgctcagctccaggagtgaagaagagatgctaaggaggaagtgtcaccccacaaagcaaatatgaagcagagaggaagccacaggaaagacggagaccctcttcagtatcccctattgtcagagtatatattgacccagctaacaaagcagaaatatgactcacaaaataccagccccagcaccacaatattaaagtgtaggagggtgtgtttgaagttgggacaatagcttaaaaactgaaataatctattaccaaaaagctgatctctacaatgtggtattgcatgcctcgatttaaaattatgttgctcttgtttagattttgtttcctttgagttctggaccgcatagtgttttcgtaatactaggaacacagaaaagaaaagctacatctcatgctcagtaggaactaaattcctttgaagatctcttcaaaggattcacttccaccaaatatatttcaaggtgaattttaccaaatgaagttataagtttaattaacagataacattaagttacctttgagaaatagatttttatttttcccgatttcaatttttctttctttctttctcttgagacagggctaacaaaatttttaagggcaaagacatcttcacccctaatttattatccttattgagaaataaaatatttaaacgaaatgtagaattgagggaaggtattcaagggaacaaagaagagagggaaatatcttgatatatctgtaattattctttccacagattttctggttcagagagtttgaggctctagacataaaagaattgcttagggcgggtgcggtggctcacacctgtaatcccagcacattgggaggccggggagggtggatcacctgaggtcagaagttcaagaccagcctggccaacgtggtgaaactctgtctctaataaaaatacaaaaattagccgggcaagatggcagatgcctgtaatcccagctactggggagcctgaggcaggagaattgcttgaacctgagaggtggaggttgcagtgagccgagattgtcccactgcactccagcctgggcaacagaacgagactctgtctcaaaaaaaaaaaaaaaaaaaaaaaagcccggcttatgcctgtaatcccagcactttgggaggccgaggtgggcagatcacctgaggtcaggagttcgagaccagcctggccaagatggtgaaacccccatctctattaaaaatataaaaattagctgggctaggtggtgggcgcctgtaatcccagctactcgggaggctgaggtagattgcttgaacctgggaggcagaggttgcagtgagccaagatcgcaccattgcactacagcctgggtgacaagagcaaaactccatctcaaaaaaaaaaaaagaaaagaaaagaaaaaaacagaatggcttagattcagattcaggaaggcaaacactactgcttaaagttataatagttccagtaatcctgcatcagtgttcagatttgagttctcatgcttatgggtcctaatgttgactgcatatggttacatttaaaaaaaatgagctaaatatctgatacctgccttccttaagttccaaagtcaagcaaagcttaactttattaaggtgtttcttttttacttttaaagagaagaagaagaaattgatgaagaggaattggaaagattgaaggcagagttagatgagaaaagacaaataattgctactgtcaaatgcaaaccatggaagatggagaagaaaattgaagttctcaagtatggtgccactttttataagtagaaacactttccctgatattgattttctaaatcctctgaatattccatatatatatatatatatatatatatatatacacacacacacacacatacacacacacacacacacatacactgtatatatagtatatgtaatactatatatatcatttatatatgactcattatatataatggtcacagtcataaacatgtatatcatatttctgcatatatacccaaatatatgtatatttacatatatctgtttcttatcactagagagactgggctaatgattataaattggaagcaactctgagaaattatttagagtcttttaaattctttggtcatctttaatcatttgttccttaaactggagtttccttagcttaatacatttgttaccatctctttgaaagagataatatatttgaattttacaagtttgtgtggattgtgcactcttgtttctcttcagggccctggtctcaaatgaacttttcatgtgacagcttacattaaagcacagagaagatgctaggccaacagaatagtaaataggattccaattaaaggttatgctaatagctattccccgaacatgtcagtgacccaatttcagtcttatgttgatgctaatgtggacgcgaacgcagtcagagcacacagatttataaactcttcatatgaaaagtcaaatgattatcctattctgggggatgggaagattcacccctgaggatcacactatatttccctgccctggtggttgggagaggaggaaagggcagggaaaagggaaactgtttgtgataacagccatgtttgcatctcctagttttgccaaagattgcattcttccataaatcatttttataaatagtagtaagttttaaaaactatcccttcacaagcctatttaactagtaatgctgtaaaaatgatagtatagtattattgtctctgatgatgaaaacaagaactgaaatagctatcaggataattcacttctagtcttggttctgcaagagcttgtgtgctatttaaaggtatcgcttaatctcctgaagccttagttacctcatatccaaaataaagaaagatattctatatcttctctgtgcgcttgaagcgtagccatcatttatagtatttttgttttgttttgtagagtaaggttttccaagttctaaacaatggttttcccagaaaacttttgcaacaccacaaaattgcagtctgggaactccctttgcatgctcatgtacacatccatcataaatgaaggcaaaggcaagcagcatcctacgttccacagagctacaaattttgtgtatgcatgctcatgtgtctgtacattaaaataattttcatttagcgaagtgataatgatgctaaattataggttttaaaaatattcttacctggcaaaatagaagtttggcaaccctatgtgggcctctcaaatatatttgaaatattaatgacccataaagtccccaaacttgggaacttcagataactatatatagaaagtttaaaattggagcaatattgtgaacttccaaaatatatgattgaataaaaattccaaggactacctttcctttccaactgcatggaggtgtagaaatacccccctggtctttgcccgtatctctcgtgcaggatcgtggaggagacagcagcttcagatttgagttaggatctcagatcttccatttaatagctgtgcacatttgatcgagttgtgtagtctctctacacaactcaggttccttatgaaattgtaccttattgacagagtttttggaattataaaatgagataatttatgtaaaacatgttgccagaacttggcacatagctgggaaacctaagttgtagttattacttcatctcagaacagacttgatgcccaattcctgaagggtgacaagagagatggagagaatttgggacctggcaagtctaggtgggagcagacctagtcacaatcagaccccagaagccttgtgggatggtgacacattggtaccagtttggataaacaataagattttgaggatgcaacagaaggaagtaaggcatttgacaatttagcaaaatccaggaccagaccgttctcagatcttctaaaacatagccatagttctgtggcagatttcaaggtctcaggccttggtctggagtccaagagttaagcaaattttagcaatggggagagataggcattagcattggaaagaaggacaatacgagcccttagtacgaaagcagacactgacaataaggagaccgcacctgactctaatctagacataggtttttttatttggcccacatgtgttttgtttctttttcttttattttttttaaccgtggcaatatatacaatacaaaattcaccattttaaccatgaaatcgattttctttatcataatttttttcaatatttttaaaaatttaaattactttttttttctcgagacagggtcttaactctgttgcccatgctggagtgcagtggtgctatcttagctcactgcagcctcaatctcctgggagcaagggatccttctgcctcagtctaccacgtacctgggactatatgtgcacactaccatgtttggctaattttttctttttgtgtagggatggggtcttactatgtcgcccaggctgatctcgaactcctggcctcaagccatcttcctacctcagcctcccaaagtgctgagattataggcatgagccactgcacccagcctcaatcttttaaaagtgggagtaaaatattcagatgttcagcttttcatgaacaagtggaagatttggtcctacattcttccatcacagtaacagctaggactaagcacctggcctctattaatggggcattcctttttcaatttgcaccattctcaaacaatccatattacttgtttatgctgcttggctggaccctgtagacattcagatttgctgcctcctaccagtgcagctggggaacaagctaggcatgttaccaagacggtgattcagatcttcaaagccaaagtcagctcacagaatggaagcacaaatttagtcccagaaaagaaacaactgtggcttctcacatgtcagcaaggctcacagtctggtgatgattttccatggccagaagtggtttctgccttgtggccgcacctatgggttccagctggtgccatggccggggccagcctaattcttttggtttcagtctccgtgatgaagttgttggtacttaagtgcctgacttatctctctttgaatgctctattgagctttttttgaatgttctattgagcttctccccaccagattccaactacattattagaacaagtggtcagtacttcacagaacgtgcaggtaaatgtttctctaccccaatgccaccaatgcttgggagtgaggcagctttccctctaccctttatttctttcagagacatctaactttgagagcgtgtttctaaggattatgttattaatattccccaaattagcctgcatcatcgctcctggctaagtctgtgaaacccaagatactaagctcagtgtaactgaaagagatgttttgatcacagctttgaatctgtgcctgggttcgaagccttcttgttctggacttggagaaagttttgaaacttctaaaagatattttagacagtgtcagggttttaagatatattttagagtaagcctcaggaatggcaacttatggttctgagggtgttatgggagactcagagatagttcccacatttttaaagagcatctaccattaggaacccgagcacactcagggcttaggatcaaaagatggttaatataagtggttgctacataggcaggcagctctaggaattggttgtgaatccatattaatcctcaaacatggctcaggagctagagttcagcattttcaagatagcagaattggctctatacagctgaaaggaagccatctccttttcatcatcactgtggaaattgtgattttcattctatgttttattgtatatcaatacaatttcacacattcctgtagccttaaacctactgaatgataatctcttggtggaaaggcaggtgtgtctggcccagaccagaaatgtatatttttattttttgatctaaaaattactgatatatagtcagaatgaaagctgctgttttcaattctgagagacagaaagctccactaaacagaatactcagctctacagatgatttatacaatgaggaagagtgtgtgtagggagttggaggggggtaagggaaacagtgtcatattttccaattatttgaaagtcaatttctatattttattaatcacatcatttaaaaatatccattaatgagaatactaagtataatctgtttttaagctgttcatgggtttaattcagaggctgtatgactagatctttcctacctataagaggtcgcagcacttacctgatagcagccaccacaagtgaaataaaatacccaggtagaaagtaacaggtctacttattacttgtcttgaaacctaagacttttaactgtatcagaacattatatgtggtagattgaaagtgctcatgactaaacctaaataagcaaccaccttattttgttacagtagaataggttttagactgaaaattgagacttggactttgagctaagtgcttcctataacttctctttgaacctccatttattcatttataaaacagataaattggattgtggaccatggtcttcaaactgctatcctccaaagtcaagcagtttggtgaaatcaaatcagggcaaaggaggcagaggtcgcagggagagctactgggccacaatgccggcttcaaaaacagacctatggtttctctcttctacacagtgtacttccatataaagcattgattggaagaaagaatgcttctgtggctattaaaataaaaaacagttttaaaaacccacttagctggatatttaaagaaacttattttggagaagggacagttctaacatttcatgagtctacaaattaggatacagaaacactccaagtatacttttgcagggaattggcttttggatagacaccattttaaaatgatttattttgataacaaaaatgtttatttagctattatactgactactttaatttctgagctttgtagtaccctgacctattgtttctgggagttgtccattggctggctaggcctggtgatttattaatgagacacccagtaaagccaggaaagttatcctcagatttcattcacacttaaacaggtgcttcaaactgtcagctggccattaaggtaacattcctccttactcaatctcccttgatcttttcacacttcttttcatttgtttgtttgttttttattttgttttattttttagttgggagaatgaatacatttttaggaaagtgaaaacagaccatggttgatttcctctaatggagctgttgggaaaactttgggaaaactatttatttggcttccattctcaccctttctctcctgttttcttgtagcttaagattttcacaggcaagaatcatggtttatactttagtttttctctcatctgtcattgtgaaggaataaaagatgctatacaagaggacatttaagcgtgtgaacacacccaccaacataccctcaaaccattctggattattttcttttttaaattttatatttccataagtttttggggaacaggtggtatttggttaaatgagtaagttcttggggaacaggtggtatttggttacatgagtaagttcttctgtgatgatttattagattttggtgcacccatcacctgagcagtatacactgaacccaatttgtagtcttttatccctcatcccaatcccaccctttccccagagtccccaaagaccactgtatcattcttatgcatttccgtcctcatagcttagcttccacttacgaatgagaacatatgatatttggttttccattcctgaattacttcacttagaataatagtctccagttgtatccaggttgctgtgaatgccaatatttctttctttttctttttctttctttcttttttttttttttgagatgggatcttgctctgtcacccaggctgtagtgcagtggcgtgatctcggctcactgcaacctttacctgccaggttcaagcgattttcctgcctcagcctcctgagtagctgggattacaggcatgtgccacaacacccagctaatttttgtatttttagtagagatggggttttgccatgttggccaggctggtcttgaactcctgacttcgggtgatctgcccaccttggcctcccaaagtgctgggattacaggcgtaagccaccatgccaggcccaaatgccaatatttcactcctttttatggctgagtagtattccatcatgtatatataccacaatttctttatccattcattgactgatggacatttggtctggattcatatttctgcaattgtgaattctgctgctataaacatgcatgtgtaagtatcctttttgtttaatgacttcttttcctctgggtagataccctgtagtgggattgctgggtcaaatggtagttctacttttagttctttaaggaatctccaccctgttttccatattggttgtactagtttacattcccaccagcagtgtagaagtgttcccttttcaccacatccatgccaacatctattattttttgatgttttgattatggccattcttgcaggtgtaaggtggtattacattgtggttttgatttccattttcctgatcattagtgatgttgagcattttttcataagttttttggtcgtttgtatatcttcttttgaaaattgtctattcatgaccttagcccactttttgataggactgtttgtatttttcttgctaatttgtttgagttctttgtagattctggatattagtctttgtcagatgtagagattgtgaagaccttctccctctctgtgggttgtctgtttactctgctgactgttccctttgctgtgcagaagctctttagtttaattaagtcccacttatttatctttgtttttgttgcatttgctttggggttcttggtcatgaagtctttgcctaagccaatgtctagaaggttttttctgatgttatcttccagaatttttatagtttcaagtcttagatttaagtccttgatccattttgagttgatttttgtataaggtgagagatgaagatccagttttattctcctgcatgtggctagccaattatcccagcaacatttgttgaatgaatagggtgtcttttccccacattatgtttttgtttgctttgtcaaagatcagttggctgtaagtatttggatttatttctgggttctctattctattccattggtctatgtgcctatttttataccagtagcctgctgttttggtgaccatagccttatagtatagtttgaaggaaggtaattggatgcttccagatttgttctttttgcttagtcttgatttggctatgtggcctcttttttggctccatatgaattttagaattttttttctagttctatgaagaatgatggtggtattttgatgagaattgcattgaatttgtagattactttaggtagtatggtcattttcacaatagtgattctacccaaccacattagcatggatgtatttccatttgtttgtgtcatctgtgatttatttcagccatgttttgtagttttccttgtagaagtatttcacctccttggttaggtataatcccaagtacttttttttttttcctgtggctattgtaaaaggggttgaatagttgatttgattctcagcttggtcactgttggtaaacagcagagctactgatttgtgtacattaattttgtatcctgaaactttgctgaattcatttattagttccaggagctttttggaggagtcttcagggttttctgggtatatgatcacatcatcagcaaacagtgacagtttcacctctttaccaatctggatgccctttatttctttctcgtgtctgattggtctggctagtactatgttgaatagtagtgagagtgggcatcctcgtcttgttccagttctcagagggaatgctttcaactattccctgttcagtattatgttggctgtatgtttgtcatagatggcttttattacattgaggtacgtcccttgtatgccgattttgctgagggttttaatcaaaatgggatgctggtttttgtcaaatgctttttctgtgtctatttttttttcgggggggtgggtgtttaagagcagaaagtttaataggcaaaagaaagaagagaaaaccacccccatgcagagggagggggatcctctcttgctgcatctattgagatgatcatgtcatttctgttttaattctgtttatgtgttgtgtcacatttatttacaagtgtatgtcaaactatccctgcatccatggtatgaaattcacttgatcatagtggattatctttttgatatggtgttggatttggttagctagtattttgttaaggatttttgcatctatgttcatcagggatattggtctgtggttttctttttttgttttgttctttcctggttttggtattagggtgatactggtttcatagaatgatttagggagtactccctctttctctttcttgtggaatagtgtcaataggattgaatgtctgatagaattcagctgtgaatctgtctggtcctggacttttttttgttggtaatttttaaattactatttcaatttcattgcttgttattggtctgttcagggtttctaattctgattctagctaaatcctcctgatttaagctaggaggattgtatctttgcaggaatttattcatctcttctaggttttctagtttatgtgcataaaggtgttcatagtagccttgagtgatcttttgtatttctgtggtgttggctgtaatatctcctatttcatgtctaatagagcttatttggatcttctctcttctttgcttcattaatcttgctaatcgtctatcaattttatttatcttttcgaagaaccagctttttgttcaatttatcttttgtatttttgttgttgtttcaatttcatttagttctgctctgatctttgttatttcttttcttctactatttgggtttggtttgtttttctagttccttgaggtgttaccttaggttgtctatttgtgctctttcagactttttggtgtaggcatttaatgctatgaacttttagcaccacctttgatgtatcccagcagttttgataggttgtgtcactattattgttcagttcaaagaattttttcatttccatcttgatttcattgttgacccaacaatcattcaggagcatgtactttaatttccatgtatttgcatggattggaggatttcttttgatttccaattttattccactgtggtctaagagagtacttgatacaatttcagttttcttaaatttattgaaacttgttttctggcctgtcatatggtttatcttggagaaagttccatgcactgatgaatggaatgtatactctgtggttgttgggtagaatattctgtaaatatctgttgggtccatttgttctaggtatagttttaatccattgtttctttgttgactttctgtcttgatgacctgtctagtgctgtcagtggagtattgaagtcccccactattattgtgttgctgtctatctcatttctgaggtctagtagtaattgttttataaatttgggagctccagtgttaggtgcatatttatttaggattatgttttcctgttgaacaaagccttttatcatgatttagtgtccctctttgtattttttaactgctgttgctttaaagtttgttttgtctgatataagaatagctactcctggtcacttttggtgtccatttgcatggaatgtaattttccacccttttacctcaactttatgtgagtccttatgtgttagttgagtctcttgaagacagcagatacttagttggtgaatactttttttttaaattatactttacattctggggtacatgtgtggaatgtgcaggtttgttacataggtatacacatgccatggtggtttgctgcacctgtcaacccgtcatccacattgggtatttctcctaatgctgtccctcccttagctccgcatccccaaacaggccacagtgtgtgtacatgtgttctcattgttcaactcccacttatgagtgagaacatgtggtgtttagttttctgttcttgtgttagtttgctgagaatgatggttttcagcttcatccgtgtccctgcaaaagacattaactcatccttttttatggctgcatagtattccatggtgtatatgtgccacattttctttatctagtctatcattgatgggcatttgggttggttccaagtctttgctattatgaatagtgctgcagtaaacatacgtgtgcatgtgtctttacagtaaaatgatttataatcctttgggtatatacccagtaatgggatggctgggtcaaatggtatttctagtttcagatccttgaggaattgccacactgtcttccacaatggttgaactgctttagactcccaccaacagtgtaaaagcattcctatttctccacatcctctccagcacctgttgtttcctgactttttaatgatcaccattctaactggcgtgagatggtatctcattgtggttttgatttgcatttctctaataaccagtgatgatgagcctttttttcatatgttggttggctgaataaatgtcttcttttgagaaatgtctgttcatgtcctttgcccactttttgatggggttgtttgatatttcttgtaaatttgtttaagttctttgtagattctggatattagccctttgtcagatggatagattgcaaatattttctcccattctgtagattgcctgtccaatctgataatagtttcttttcctgtgcagaagctcttcagtgtaattagatcccatttgtaaattttggcttttgttgccattgcttttggtgttttagtcatgaagtctttgcccatgcctatgtcctgaatggtattgcctaggttttcttctagggtttttacggttttaggttttaggtttaagtctttaatacatcttgagttaatttttgtataaggtgtaaggaaggaatccagtttcagctttctgcatatggctagccagttttcccaacaccatttattgaatagggaatcctttccccattgtttgtttttgtcaggtttgtcaaagatcagatggttgtagatgtatggcgttatttctgaggcctctgttctgttccattggcctatatatctgttttggtaccagtaccatgctgtttttgctactgtagccttgtagtataagtttgaatcaggtagtgtgatgcctccagctttgttctttatgcttaggattgtcttggctatgcaggatattttttggttccatatgaaatgtaaagtagtttttttcaagtctgtgaagaaagtcaatggtagtttgatggggatagcattgaacctacaaattactttgggcagtatagccattttcacgatattgattcttcctatccatgaacatggaatgtttttccatgtttgtgtcctctcttatttccttgagcagtggtttgtagttctccttgaagaggtccttcacatcccttgtaagttagattcctaggtattttattcactttgtagcaattgtgaatgggagttcactcatgatttggctctctgtttatctgtttttgatgtataggaatacttgtgatttttgtacattgattttgtatcctgagactttgttgaagttgctaatcagcttaaggagattttgggctgagacaatggggttttctaaatatataatcatgtcatctgcaaacagagacaatgtgacttcctcttttcctaactgaataccctttattcctttctcttgcctgattgccctggccagaacttccaatactatgttgaataggagtggtgagagaagacatccttgtcttatgctggttttcaaagggaatgcttatgcttccagtttttgcccattcagtatgatattggctgtggatttgtcataaatagctcttattattttgagatacattccttcaatacctagtttattgagagtttttagcatgaagggctgttgaattttgttgaaggccttttctgcatctattgagataatcatgtggtttttgtgattggttctgtttatgtgatggattacatttattgattcgcatatgttgaaccagccttgcatccccaggatgaagccagcttgatcatgttggataagctttttgatatgctactggattcagtttgccagtattttattgaagatctttgcattgatgttcatcagggatattggcctgaaattttctttttttgttgtgtctctgccaggttttgctattaggatgatgctggcctcataaaataagttaaggaggattccctctttttatattgtttggaatagtttcagaaggaatgataccagatccttttagtacttctggtggaattcatctgtgaatttgtctggtcctggactttttggttggtaggctattaattgctgcctcaatttcagaacttgttattggtctagtcagggattcaacttcttcctggttcagttttaggagggtgtatgtggctagaaacttatccatttcttctagattttctagtttatttgcatagaggtatttatagtattctctgatggtagtttgtatttctgtgggatcggcggtgatataccctttatcattttttattgcatctacttgatttttctctcttttcttctttattagtctggctagttgttgatctttcaaaaaagccagctcctggattcattgattttttttttttttgaagggctttttgtatctctgtctccttcagttctgctctgctcttagttacttcttgccttctgttagcttttaaatttttttgctcttgcttctctagttcttttaattgtgattttagggtgtcgattttagatctttctttctttctcttgtgggcttttagtgctataaatttccctcaacatactgctttcaatgtgtcccagagattctggtacattgtttctttgttctcattggcttcaaagaacatctttatttgtgccttaatttcattatttacccagtagtcatttaggaacaggttgttcagtttcgatgtagttgtgaagttttgagtgagtttcttaatcctgagttctaatttgattgcactgtggtctgagagactgttatgatttccattcttttgcatttgctgaggagtgttttacttccaattacgtggtcaattttagaataagtgcgatgtggtgctgagaagagtgtatattctgtttatttcgggtggagagttctttagatatccattaggtctgcttggcccagagctaagtttaagtcctggatatccttgttaattttctgtctcgttgatctgtctaatattgacagtggggtgttaaagtctcatgctattattgtgtgagggtctaagcctctttgtaggtctctaaggacttgctttatgaatctgggtgctcctgtattgggtgcatatatatttaggatagttagctcttcttgttgcattgatccctttaccattatgtaatgctcttctttgtctttttttgatgtttgttggtttaaagtctgttttgtcggagactaggattggaacctctgcttttttttgctgtccatttgcttggtaaatattcctccatccctttattttgagcctatgtgtgtctttgcacgtcagatgggtctcctgaatacagcacaccaatgggtcttgactcttaatccaatttgccagtctgtgtcttttaattggggcatttggcccatttacatttaaggttaatattgttatgtgtgatttgatcctgccattatgatgctggatggttattttgctcattagttgatgcgatttcttcatagcgttgatggtctttacaatttagtatgtttttgcagcggctggtactagttgttcctttccatgtttagtgcttccttcatgagctcttgtaaggcaggcctggtggtgacaaaatctctcagcatttccttgtctgtaaaggattttatttctccttcacttatgaagcttagtttggctggatatgaaattctgggttgaaaattattttctttaagaatgttgaatattggcactgtcttctggcttgtagggtttctgcagagagatctactgttagtctgatgggcttccctttgtgggtaacccaacctttctctctggctgcccttaatattttttctttcatttcaaccttggtaaatctgatgattacatgtattggggttgctcttcttgagcagtatctttgtggtgttctctgtatttcctgaatttgaatgttggcttgccttgctagcttggggaagttctcctggataatatcctgaagaatgttttccaacttggttccattctccccatcactttcaggtacaccaatcaaacatagatttggtcttttcacatgatcccatatttcctggaggttttgttcatttcttttcactgttttttatctaatcttgtcttcttgctttatatcattgaattgatctccaatctctgatagcctttcttctgcttgatcgattcggctattcatactcgtgtatgtttcatgaagttctcgtgctgtgtttttcagctccatcaggtcatttatgtcctctaaactggttatttcagttagcaatttgtctaaccttttttcaaggttcttagcttcttttcattgggttagaacatggtcctttagctcggaggagtttgttattacccaccttctaaagcctacttctgtcaattcgtcaaactcattctccatccagttttgttcgcttgctggcaaggagttgtgatcctttggaggagaagaggcattctggtttttggaatgttcagccttttcgcactggtttctccccatcttcgtggatttatctacctttggtctttgaagttggtgaccttcggctggggtctctgagtggtcctttttgttgatgttgatactattcctttctgtttgttagttttccttctaaccatcaggcccctctgctgcaggtctgctggagtttgctggaggtccactccagaccctgttcacttgggtatcaccggcagaggctgcagaacagcaaagattgctacctgttccttcctctgaaagctttgtcccagagggacatccaccagataccagccagagctctcctgtatgaggtgtctgtcagcccctactgggaggtgtttcccagtcagtatacctgggggtgagggactcacttgaggagtcactgtgtcccttatcagagctggaacccagtgttgggaaatctgctgctctcttcagagctgccacacagggctgtttaagtctgctgaggttgcacccacaaactccccttcccccaggtgctctgtcccaggaaggtgggggttttacctatgagtccctgactggggctgctggctttttttcagagatgccctggccacagaggagggaatctagagaggcagtttgggtgcagtgtccttactgagctgtggtgagcttcgtccagtttgaacttcctggcaactttgtgtacactgtgagggtaaaaccccctactcaagcctcagcaatggcagacgtccctccccccaccaagctcgagcatgccagatcgagctcagattgctgtgctggcagcgagaatttcaagccagtggatcttagcttgctgggctccgtgggagtgggacccactgagccagaccacttggctccctggcttcagccccctttccaggggcgtgaatggttctgtctcactgacattccaggcaccactggggtatgaaaaaacaactcctgcggctagctctgtgtctgcccaaacggcagcccagttttgtgttggaaacccagcaccagggccctggtggcgtgggaactggagggaatctcctggtctgcaggttgtgaagaccatgggaaaagtgcagtatctgggccggtgtatgtggtacagtccatagtggcttcccttggctaggagagggagttccctgatcccttgcacttcctgggtgaggcaacgccccaccctactttggcttgccctccttgggctgcatccactgtccaaccagtcccaatgaaatgaactgggtacctcagttggaaatgcagaaatcacccaccttctgcatcgatcttgctgagagctgcagactggagctgttcttgttttgccatcttgccagcaaatcggtgaattgttatgtattctgcaattctatatcttttaagtggagcatttaggccatctgcattcaatgttagtattgagatgtgaggtactattctattcatcatactatctgttgcctgaataccttggttttttatttatttacttatttattgtatttttgttttaatgggtcttgtgagactcatgatttagagattctgttttgatgtgtttccatggttcgtttcaatatttagagctcctttcagcagttcttatagtgctggcttggtagtggcaaattctcttggcctttgtctgaaaaagactgtatctttccttcatttatgaagcttaggatacaaaactgttggctgataattgttttgtttaaggaggataaaaataggaccccagtcccctctagcctgtagggtttctgctgagaaatctgctgttactctgatagattttcctttataggctacctggtgcttttgcctcacagctcttaagatttttccctctgtcttgactttagataacctgataactataggtttaggcaatgatctttttgcaatgaatttcccaggtgttcgttgaacttcttgtatttggatgtctacatctccagcaaggctgaggaagttttcctctattattcccccaaatatgttttccaaacttagatttctcttcttccttagggactccacttattcttaggtttggtcatttaacataatcccaaacttcttggaggctttattcattttttaaaattcttttactttccagtacattttgcatttctctgtgttctttacttcctgaagtagtgattgttttatatttatgctatctatttcactgaagatttctcccctcatatcttgtatcatatttttttatttccttaagttggacttcacctttttctggtgcctccttgattagcttactactcgaccttctgaatttttttttctggcaattcagggatttcatattggtttggatccattgctggtgagctattgtgattttttgatgatgttaaagaacattattttgtcatattaccagaactgtgtttctggctccttcttatttgggtaggctatttcagaggaaagatctgaagctcaaggctgctgttcagattcttttgtcccatggggtgttcccttgatgtagtactctcccccttttcttaggaatgtggcttcctgagagccaaactgtagtgattgttatttgtcttttggatctagccacccagtggagctactggtctctgggctggcactgggggatgtctgcacagagtcctgtgatgtgaaccatctttaggtctctcagctgtggataccagcatctggtccagtggaggtggcagaggagtaaaacagactctgtgaggtgccttagttgtagttgtttaatgcactagttttgtgctagttggcctcctgccaggaggtggcgctttcaagagtacgtcagctgtggtagtataggggaggatcaggtggtgggtgggggccctagaactcccaagaaaatatgaactttgtctttagctaccagggtgggtagggaaggaccatcaggtgggagcagggttaggtacgaatgacctcagactctccttgtgtggggcttgctgtggctgctgtggggataggggtgtggttctcaggtcaatggagttatgttcccaggaggattatggctgcctctgctgtgtcatgcaggttgtcaggaaagtggagaaagctgatagcctcacccagctcccatgcaacccaaaaggctggtctcattcccactgtgccccctccaacagcactgagattgttttcaggcagtgggcaagtagggctgagaacttgccccaggttaccagcctcctggttgagaaagcaagcggggcttttgtgccacctccctgcctgtcaccggattcacatcctcccccaagttctggccaggaaacttcacatttggttggaatcgttacagagttcagctggaggtttccttctccctgtggtcttttcccagttcctctggcagccctcctcaaggactcctgtgagacaagtcagaaattgcttctctggggacccggagaacccacatggcttttcctgtggcttcttctacccttgtgtttcactcagctctctaaattgtctcagctccaggtaaggtcaaatctttctcttgtgatctggacctttaggttccccagtgagtgtgtatattcggggcaggggatgatctccctttcccacttttgcagtttgggcactcacagtatttgggctgtctcccaagtcctgcaggagcaacctgtttccttcaaatggtctgtggattctcttgactttcccagtatatttctgcagcagttcttggaacaaaagttcacaatgcaagtctccacattctattctatccatccaagtgggggctgcaatttagtcctgactcctatctgccattttttcctagcagttcattctggattatttttaaccaataactcaaccaaagcacaggccttcagttcttgtactttacaggtatcttgagtatagcaatttttcatctgcagaatggagagtatataggcaattaatgcatctagattttgtccatcaaaaggtaacattgacatcccatttttctgctattttataagttcataccaggtgtcaagcattatgctgtgggcaagtttcttagtctctacatccttgagtctccttactatgaatggagataaaagtactactgcataaagttattgagataattaaataagctcatagatacaagcatgtaacatggtacctagcataataattttctttatccctcttaaccctccttcaaggtaggttttactattttgactttacatataaggaaactgaaactctgagaggataaataattgtcagacaattaataagtgatagatccacaatttaagcttgttgtgtggaaacttaccttggtatgatggaggtctctaagtacactaccaagcaagctctcccagaagtcacaaacctgaagttcacataccaaattaaaatgctcaaatcacatggcttagtaagcttatttaaagcacagtgagaagtaaggggaaagagatgggttatggtaagacatgggataaagtagcaatatcgtgagatcatgggcaacaggaccacacttctgtatcctgtgttctgcagtgttcgtgtgccctgtctctctcatcctgctgatagtgtggctaaggggactgaggtcccaatgggggccacataataaagattacttgggccaatgataggtacaagctccattggaatgaatgacacaggacaagtacgcctgatcatagcagtagcttgtgattagcctgctgaaattgcaggagttgtgtctgcatttcttggacagagcagatgcaagaggaacaaactggatgacaccaatggctggtcaagttagcagtgacaggtatctcagtcccaaagtgtcaggataatgatttggtcttttcatctctttctaactgtaatgttcttgtttgttcatcatatatatttttaaaaatttattttctgtctttctttggcagatattacaggttactaatttacctgctatctgtagtgaacacatcaaacatgcctatgcatcatatgtacatgtttacttattagctatatttaacatatcctatgtgcaggaccagctacataatttgcatgatgtaatgtaaaatgcaaatggggggccccttgttaaaaaatacttaagaatttctattattaagaattttaagatgatgaaagaaaccagaatatgccagctctaaatatgcctcattgacgtaaatatttttgagctgaagggaattaagaagcacatgcagaaaagctctctgcctcttctatttgcctaaaagcaggacagagaattacaaaaacaaaaggtcttttatgttcctcctcccctttcctgcctaaagacaagatgtaaattctcctttacaacctttaccagctgagagcctgcttcagaaaaatctgggaacagacttgactctttcccacagttctctggcctttggaagcttagggctgttttcctctttgtcctgtcacttctctacaatgtattgatcttgttgaatactttgtattagctgggattctaagccacactgccttgagttacttttcacctgcgtgatgttcatgtattaatagacttgtttgtttttctcttgttaatctgtcatttgttacaggagactgtctcaattaaaaacttacgagggttcagaaaaattataatttcttcccaacaatgacaatagcagagcataaaactaagcacagggcccatgtgagtatggggtcctgtaacagtgcaggtcacaggcctatgaaattgcccctgcctatgaatttcacctgactattccaagccaagagctacttattatctatgctgaacatttctaatgatttccatcttttccaatagcagaattcagtggtctcaaataattcagccaactcacattatagaactcaagtctatgtaactccaagtcactgttcatgcactatagtcatggagttctttttaaatacctgtcatccccatgttcaaacccttcaatgtctccctagtaattaacaaaatttagtcaattttgcctaaaaaatatcggtgagctccacaacctgaattccaacttactttccaaagcaaactctcattaattactgatgatgaccatgaggttttggagagggacaaaaccatctccaaatgtttttgagtgtctcctgtgtatcgtgtcctgtactagatgttttacacatcaactcatttaatccttatgagaacattgaaaacaaagttatccccattttacagatgagaaaattgagattgatagaggtaaggtcaccttacacagttattaactgtgagggtggattaaaatccagatttctctgtctctaaaacctcaggctttttctactgtgccatactacttctaatttgaactgtattttccagtgaaatgagattaatcttccctatagacatgccaggtacctgttatcactttattctggtatccgctccattttttggcatcctatgcttcttccatgcctgactttatctcccgtttgagcctctttctctgccaacgcccatagaaataaaattcaaatgaattctcttgattattcatttggctcttctgttaggcagcattgtgttgcatttttaaaaattatatgtaaatctccatttcagaagagattttgagctcctcagggcacgaaacgtatcacatagctctttattgtctcaagtactagcatagtgctttgtatgcaatatttaattaatattttctgtgtgggtgaaaatgttaatgtcttttttgttggacattcatttccaaagcagaacaattaacatgactggatgtttaaagggtctggatgaataggtgagtgaaggacagaaatgtgctggtaaaaagccctgatctatagtgcttgccaatttccgtggtgtaaatacttccactatagccaattttaagctaccaacagttagagccaactcacaaaattcttgaaaatttcataatcagtggttttgtgtgagccagcataagtcagcttcggtatctctttgagggatttaataatgaactcaactaaggtaaaactgatctggaacaactgaaagcagaggttaaagtaaaataactctgttatttaatctataatcaactatgaaatgcttgaattagagctgcctgtgagaaggaaaaacaatgattccataatgtgaaggctccagacaaaggccaaaagtgcatcaatgacttcttatcccagttttttaaactaaaaaaactgctagctaaatgatttttgttttatatgacttttgttttatatgacttttgtttatatgactttcctcccaaatctgttagcatgcatagagtttcagtttttctttcatcttctcctcttctgctcatttctctctttttaaattttatcataaagtggaacactttttattcaagagaaatcaattcttgattgagatcagaaatctcttgccattcacattagagttgatctaccacaattgcctgcttcatcattttcattctattggaataagtatttacagctataaactatcctgcatcttacatatttctattaaacaagaacaatgtccgtgacagttttctgtctcaggatttatcttattaatatttattgtattgttatgagtgcttagcaaattattgtggttaactttaccaatgcctttcaaataatattttgaaattttccctgaaaggatattgagaaaagccaaatgtaaaaattattgttttttttccttgggatttgcatgttttgaaaacgttctcaattgttagggaagtcagctgtaaaacacaggctaaatatacttttgtctaccaagaattccctttacttgtctgtttcgtgatttgtttaatctttcttagttatgcatgtaccattttaccatagttacctggagatattcttgtctctgccttagtttggcaggcttttcaagtggctcactgagctactgtttctatttcttttagaaagttgtggaggcatttattactctcataactgcctcaaaatctcaagcacatggcctagttaaatcatcttgaggttctgcccatatggttgcagaaggatattagtcattggaaaaaatgggtctaaaatgataatattcaaagatgttttccaatattcttggcaatcttattcactaatttccacggacatttaattagcaagaatttaaagaaccttgttttagtttcctgctgctgtaatagaatatcacagactggataatatataaagaaaggaaatttattgggcttatggttctggaggctgggaagtccaagaggcatgacactggcacctggcaagggtcatccaatggtggaaggcatcacatggtgagcaaggacgagagacagggagaaatggggctgtatttatctttttatcaggagcctactctgtgatactagcccactctcatggtaaccacattaatacattcatgaggatagagccctcatggccgaattatctcttaaaggtcccatctcttactactgttacaatggcaattaagtttccaatacataaactttaggagacatagtcaaaccatagaaatcttaaacttcaaataaacagggattttttttagtagcacagtataaaatgataataataaatatcagatataaaaaatttctgaagttctttttagatagataaatcatggttactattatcttcttagttacatttcattgcaccctattttctgtggtattatcagtcaacatattatatatagtaagacacattaaattttctgagcttgccagggcatcctgtcccctaacagtttttgataatgatttatcaaatgtgtactctttagaattttagctgtcagtaacagttgattttcacaacttttattagactatccatgatgttttttggaaaggtagttaaaaggataaatacattaattatcataaaattatctaggaatgcttttaaatacatttgacataatacattaacactaaaaggaaagcaaatatgcacctaataagcacaaaataagattaatcagagaaatgtgtccttgctgttttggggaagagttatccagatctcaggtaaggtactttttgtggagataaccttctgttttatgaagcttgtaacaagataacaatcaaggcatttttgtggccatgtttatgtatatgagcaagcaatggcaagtgagatactagtttgggggcttaaataagataaaagtagttaaactttattaaaatgcacatattaaaataaattttgaaatacattgtattcaaatattgtattagggttctcttagacaactcataggatacccccacacacacattttatgtgtgtatgtatatatatatatatatatatatatatatatatatatatatatgtatatacacacacacatgcgtacatatatatacaggagtttattaagtattaacttacatgatcacaaggttccacaacggctgtctgcaagctgaggagcaaggagagccagtcccaaaatcaaaactgaagaacttggagtccgatattcgagggcatgaagcatccagcacaggagaaagatgttgtcggggaggctaggccagtctctcattttcagatttttctgcttggtttatagtcactggcagctgattagattgtgcccaccagattaagggtgcatctgccttccccagcccactgactcaaatgttaatctctctctctttttttttgagacggagtctggctctgtcgcccaggctggagtgcagtggcacgatctcggctaactgcaagctctgcctcccgggttcaagccattctcctgcctcagcctcccgagtacctgggactacaggtggccgccaccatgcccggctaattttttgtatttttagtagagacagggtttcactgtgttagccaggatggtctcgatctcctgacctcgtgatccacccgcctcagcctcccaaagtgctgggattacaggcgtgagccaccacgcccggcctcaaatgttaatctcttttggcagtacccacacagacatgcctaggattaattctttgtacccctcaatccaatcaagttgacactcagtattaaccatcacaaatatcataacaaatcgtgtgaaaggaggaaaggggaatagttttacatttcaaatataaggggtccaagattcccttttatagttataaaaattagaaatttttaaatggtatgaatcacttatttcaaatagttgtatttatgatgcttttgtaatatatatgcataagtttacctatatatttatatatgtgtgcatgtacatataatgtataaatacacaaaggcactcatatctacataatgatacatgattctttggatgaattaacttttacattttatgcatacactcttattgtgtttcttgaccagtgcttggtcacagggatcaggacaagttagaagggaggctatgggaggacactgtaaaatattaacacaacttaattctgcagaaaggccagttcacataggaagatggtgtcctctgagggtgcacttacccaagctgtgttccccaattgcttaggacagtcttccatgtctaagtttgtcatgtggcaaacaatcaaatttacctggtagtcctagtgatttgcagagctcactgaaatgccatcgtttaaaagcatcattttaaatttattgtccactgatagatcaaaagatagaataccctattccaagagaaaaactaaagacttctattagaaaaatttaggtttagcacttctaaatatcactatacaacattttgaaaaatgttttgaaaaaacagttataatgcttagaaacatttagaagaatataagcacacaggtattgtgttgaaacacattacctacactttcaatgcaggatgcttcttctcactatggggcagcactttgtgaatttttctgtttcacagtattcagaattcattagaacatgtttgattagaatgcacatgaggcaagcaaaattagcacagtctgtctatcaagccacgtagatggccttgcaaagagctgaatgctagtatatctaagaatatgagattatatgtatgattcatggtggaaatgtctcctttgttagataaattcctgcaaaccaatgcctggaatgccctctctgcctactcgaattctattagctctttaacatccatttgaattcttatctcatctacaatatcttcagcaactctgaagcctccattgtcctctcccttttcacttcaaggctgtcttgcattgttatgtaactatttcatgggcctagatctcatttttcttaataaagtttaagctgtagaaaggaattcatatatttccttgatttcttttaaacacttaacacattaagaacataaaacatacccagtaattacttaaagaaaaaaaagactaagtaaaagggacaatgaaagaataatagaaataaaatgaatttgtttatcagccagaattttgggtgggtcctcctcatagctatgtatagcaatctataatttcagtgctatttctacctacttctaataaaaatattcccacagtaaaggggcaaggggaaattccaccattttgcaacattttggtgattagaattgttgagatatggttttagacagagtttccttcttattcttgggctggtgattttaagattcatttgtgtgttttaggtcacattctccccaaatctcatttttgctcaacacaagaacagtaagagtaagctgggatgccttagtgatatggcctggaactctgcagcctacataatactatccctaccttcaggtattagtgttgctaataacatgctcaactgattcattaaaacaaaggacaaaaaaataaacaaacataaaatcattttcatagagcttaaagagactatccagagagacatttataaagttaccattataaaatgcttcacactaaaaaagaattctttacaataatttggttgtaaattgtgtaaaattctttttccctccatcaattttagatttattggttggagccttgtaagtcagactgacaaaagacagattaacaagagaaaaacaagcagaagtttattaccatgtatatccctcttattcatgggagatgagtaactgaaagaggaggttagaacttgagctcacatagcatcttaacaaaagaacagtacatttttaaagaagtgacaagacaaaggaaaaggactttgagtttctaggatggcaaatgatgggaaagcaaatatatgggggaactaatggaaaataaggactatttagtaaagcttgtcatgcagattcctctggtgccctctcttgactgataagtctggaatagtcttcagtgattaacttctgtccttccaggtaagaggggaatgaaaataatacctttatatatttatctcctgcttttaggcaaagggggagagcagagagcttttcttgtatctgctgcttcttgattgctttcatcttgaaataatctttataccatatttttggcacattttggcataatatggcacataatcctgacatggcatattttggggtgccatattctgctaccctccaaattgtctctacccttctattatcttagcagataatagtacaacctcccaaattttggtttccttctgtgaggaaaacacagtttgtgctgtgaccagtattgtagctcctggggaaacctgtgtggtctcctctctcttctccctgctactgtaatactaacaaaaagaatgtttaaaccataaattgaatcttaaagcaatcaagtacaaatcagagttaggaaaagttttaatcagcaggtagaaaaaggatctagtgtgcttttatttttaaatttttcattaatccactaaagcccagcttgttatttttaccttgtttcatctaaaattaccctaagatgctggcatgacctctagggtgtgactaaaatgtgtttgagtctttatttgacatttaagccagccatgaaaattagcattggtttagagctccagggagcaaagaagtcatcctgagtctgaagaatttctgtggctgtaacttggaatttcatacaaatttgacctgtccaagacttgctttaattattcactaacaccagcatctggctttaacacatcttcatgagtatcatcagaactagagaaaaaaaattcccttaagaaatttttgtacataggtcactctcatgtttgttgctaataaaaattttagaggtcttagtaatctaaaaaatatatattttacctgtaaagtggtactatccaaaaggaactataccaaaatacgtcagacataaaagttaagaggttatgaaaatgtacatgcaattctctttttgcttgttcttagtttatttactgcttgttttcagatagtcaggtagttactctttagagatgtaaaataaagtatggacatgaaaagtagttatttaccaaaggcaattatcaagtatcaaaacatgcagagtacttactgccagttcagggagacaacaaaacaattatatataatatagtagctttttagcccaatcttccaataattgctaggccaacatgctaaatttaagagttctttacctcttaaatttagtagtctcagtaaataaaatttgtttagttctgcaggggcagaaagatgtgatactttgtccctatcataaggtcaaggacaacacttctctaatgaaagagggttcacaagagaaaaacataacacatttctttaaccaaagttttatatgacatggaagccttcagaatgaagatttgaagacccaaggaaaaactgtccatttttatgcttagattcaataaagtgtgaacagccatgtagaagtgttattagacaaacagggaattatctaatagtaatgaactgagtggggaaacccagcaatacctgtccagattcttcttggcctcactgttgtaacatctcttcaccctcctggcttatttggtatagttccttttagacagtactacttcatagataaaatatatatattttgattacaaagactacaatttttgtcagcaacaaacatgagagtgtttcttcctcccttgacctactgttgaccaagactaggtcatagaatttctttatggccaccttctagacagaaaggtagagaaggttagagtaataattcttgtttttatggccggctttggggaaaagggggttttagtttctacggcctgccctggggaaggggaattctgaattctatggctggttttggggaagaacaaggggtgagaggtaggagagcaggagaaggtcagagagaccttggctctgatgctgctactgaggccttccagtgtcctttagttcaaggtgctcggcatgccaaagcagcacattcaggatatcattttctgagcccaacagttccatattctgcccccaacttgttgcacattggaattgttcatggacttacaaaaatattgatgccatatcccagccctagagattgtgacttaatttagctgtccccaacctttctgataccagggaccagtgtcatggatgacaatttttccatatactggggctgggtgaggagatggtttcaggatgattcaagtgcattacatttattctgcacattgtaatatataatgaaataattatacaactcaccataatgtggaatcagtgggagccctgagcttgttttcctgcaactatacgatcccatctgggggtgatgggacacagtgacagatcatcaggaattagattctcataaggagttcacaacctagatctctcgcatgtgcagttcacaatagggtttgcacccctatgaaaatctaatgtgactgctgatctgacagcaggaggagctcaggtggtaatatgagttagcaatgggtagtggctgtaaatacagatgaagcttcactcactcgcccaccacttgcctgctgtgtggcctggttcctgacaatcatctggtcttctcactggtattcatttgttcaattagcatttgttgaaattcacatctatgccaggtgctaaacccatatctgtgccagtggccacgacctgacagtcatctggtcttctcactgatgtccattcattcaattagcatatgttgaaattcacatctatgccaggtgctatattaagtactgggaaattagtacaaaaaatatagaccttggagattccagtgcaatggtaaaaatggactagaaagcaacacactgggataactactgcagaaaggtcagaggttaagtcacactacctagggggtggaggagattgttggaaagaaagaaaggatcaggaaaggttttgtggagaagctgtagtgttggcctaactctagaactgaagataaagaaaaggaagaaaataggtgtaggagaagagaaagggtatcttagagaaatgaaacagcatatgtaaaagcctggatgcattagaaatcaacttgcagccagcctctcatcttatgttttctctaacttatcttgtatatcattgttgaaacatttttctcacagcactgtattacacccatcaatttcctgctcaaaaatactctggatccttactaataacagaatgaattctgcactgcagacgtgacattagggcatgccagatcctcctctaaagcatttaaactgtcctcttcattgtctatctgaagaccccaggtatgttttcatctcttcatttttgcttatatcattcccctgcaccagaatgtccctcctactcctttgaccatgtaactgaatcctccctttgttcagggttccttgataccactccatctctcatctcaatcttttagcatttatgtttacttttactattcttgtttgttggtaattagatggtgccctaaatatttatctatatctttactttttaatgaaattgtaaattccttacagaaaagcataggaccacattcctttatctctctttctgcatatggtacaatgccttaaaataaacaaaatttatttttattactgataacaaaactgaatgacaataatataatgagtttggaaaatggagaaaccaagcatttgcataattgcctagtctttgatcattgatgcacactacttttacataattataatgagagtatacaaattgttctgtattctgaaattttacttgacattgtatcatcaacatttgctatgaaaaataataaatatcagctgggcaaggtggctgacacctataatcccagcactttgagaggccaaggtgggcggatcacttgaggtcaggagttcgaaaacagcctggccaaaagggtgaaaccctgtttctactaaaaatacacaaaaactagctgggtgtagtggcacaagcctgtagtcttagctacttgggaggctgagacatgagaatctcttgaacccaggaggcagaggttgatttgagccaagattgcaccactgcactccagcctgggcagacagagtgagtctctgtctcaaaaaaaaaaaaaaaaagataaatatctttggataataactaaaagcatcatttacctggtgtgccaggtactgctttgcttacactgtttcaacttttgtatgtatgtccttattccaattccatgaggtaacactggtgttatcctggggaaactgggagcactgagctcaaaaagagtagagctgtgctacttactaggtgaccttggatacttattttacttagcgaatcctcagtttccttatctctgagatggggataataatggttcccacctttcaagattttgaggggatgaagtgagatgatggacacgaatagtgcctggcagatggccaacactcagtgtgctttagctcttgctgccgtcactgttgctggtcccattttacaagtcaggaaactggatcaaaggcatttaataactctccccaaatcacacacctggtgtgtgacagagccaggattcaaacccctgtcccaattatgacatgagatagggatcacagaatttaatacgatgttgtccaagtgtaacattttacaatttagtgctacagagaacatgtgcagagttttgagagaaaacacagttggatatctacagattatcttctgcttggagagaaagagaaattgagagagatagagagagagagattcccaggggcccgagctctctacagcagcacagcatggctgggtcagggctcaggatagaattcctgactgcctcctcccaggcggtgtcataactggggcttctgaagcccaacacctgggccctctccttgggtctcaaatggagggttgaatcctctcatgctcacttactaacaagaacaattcccactttcaatggggtaacagtctgaggggaaatgggctagggttttgcctggaagtacctagttatttcttaactttgtagtttggagattcagcataaaaactgaagtcagccctgttagtagtattgctgcttatacagccgtccacccttatcagaggggaataccttccaaggctccccgtggattcctaaaaccaaggatactactgaacctgattgctgtcaatcagaacatattcctgtttatgtcttccaccacacatttaatgccttttctatcttaactaaccacttatcacacactgtggccataacttttgcagtttgaagtacaacagaaaaactagcaagaatttcttttcccttcttcacaatttcaggaagagaagacgtcttaccatagatcttagcaacctcagcatacttttttttttctgccctcattaggttgagaactttcccttattcacttaaaggaggcactttgtggcttctctttggcatatccaaattgccagcatcactaaacttatgctttgggggcattattaagtagaataagggttactggaacataagcattgtgatactgtgacagtcaatctgagaacccagagggctactaacaggaggagagtgcagactgtgtggatttgctgaacaaagggaagattcacttcccaggctggacagcacaggatggcatgagatttcatcatgctactcaggacagcacacaatttaaaacttatgaattgtttatttctggaattttccattaaatatttttggactgcagttgactacttgtaacaaactgtggaaggcaaaactgcagataagggggaactactgtaatagttactgcttatactgctcttgctatttgccatggactaagctaaacacattacatacattattttctataatggatgtgacaatcctacagagtagctactattatctccattttacagatgaagcaactgggcatcttaaccattccagctactgccatcagcatttgccttaggaaaaaaatgtgttttgaataatcacttccagtatttgggatgattttcaataattctaccagcctaactatgaagttatattatctaggaggcctctagttcttatttttaatctttgtaccttcgagtagcttcttacctctgtaactcactcccacagtaatatttcatgagaagccagattctctggactattggttaaattcttttagatggcagtgtttgttatgaaaagacttttcattcttctggtcccttcactggaaacagctagaaagtacaagttttgattacagttgcctaaacaccagttttgaaatgtctttcatttgcttgagcaataaatttgttgctcaatcatactatcaaattgaaaacaagaggaaaggaaagtcaacctaacctaacccaaaaggggaacatgtttcctgggatgagaatgtgtcaaaggcagcatagcatgacctaacacttctgtgtaatcgtggttgtatcatgtgttatgggtaaattatctattctgtaagttagtccagtgtgtgcttcttcaactaactgtgaaagcattcttgaaagaccatgaaaccttattattctaattaccaacacaacggattgataaatgaatgatgaggccaggtattattgtcattaaatagacctcgctcaattatttatcaatgagtctggggttacagctcagagagctgtgcatattgtagcacggtttgcttcagctctgagacctgaagaccagattacagtcttggcaggtggcttttgttgaatgcaattcaagggggtggtacacatttgtttcagtcagacatttggatggtttgaggccaacagatattcaaagtttatccacaaaagcctatttcattttaaccatgtagaaaaatctctttaatttattcagataaatacaaatgagtaggagaatggattagctgtagaaaatcatacatgtaaagatgttttcttgcatcttagtgttctaaagactgttctttattttcttagattctgctatctgtcatggacacttcactgttctgtattgatcaatgtttatcttcatatgagatttgtttttgtatcttctttctaattgtacaatgaaatatgttttctggttaagaaatacgttatcaaggaggatagaattgggtgatactagtttttttccatcctgaaatcatgccagctcattgcaaaggtcagccctcaaaatagtattaaggcatgccctctccttgagtctctgataccttgcagcccaatgtcccttcttgaaggcctgtcacctgcaagagtactttcttacatcctatgagcatcagatatgggggaatgaagaatctcttcttgctaaacaaatattcttggtccaccttctgccccctggctttattttaaacccatccccaacatatctgatgagttgagtctagtaattctgtcttcagtgggctatggggagcagggattagctaaaatggctgttcagggacctctttggtataaaacttggtgggggtgctggcagggatctctcagagaatgaaggaggggatagagcattagagaagaaaagaaattcatacctgagattatgtaatagataatagagtctggactttgtttaaaaaccagaatctaagatatatatgttgaggctagggcggggtagtaattgaaagagaaatatgaaactatacctagcgtcaaggaaaactaacagtaattgaagagacaaaaataaaacttgtttatattgttcaaaggaaaatgatatttataacatctgacaaaaactttattaatgccatgtagacagggttttatattattaactgagtttataattaattttgtactgattttaatttgactgttaccttggcttccttctctgtttcttaagttttgctagtttaatgttcacgagctcacaaaattaaaaatcttggtagaaatatggagtagctatttctttacatcctttttagaacaaagttgtgctttcgaattgaccacttatctagaaagtgatataaatctaataagcaaaactggatgtcttttaaattatctgttaaataactagagcagtggagatgtcctgaaagtgagcactttattacatatgaaaaacaaattttaattttactactaagaagaatttccatttctctatttatatgtgttcattattctagagattaatatgataactcctatgtatacttagttttgtgaatttcaaaattcttgatgccaaataactgaagtatagtaaattctgccgtaacatgatgtatgggttcctaaaaatcccgacactatgcaaaattgggcaataaaaacacattttactaaaaaaatggggataggcacacaatacctagaaatatcactagtggcacattacaaaaaatatgggaatttagtaacaatgacagcaatattttacacatgttaatggttaagaaatttacaataaatatggcagtttactttgaaaaagacctaacgttccctgtggaagttggccttcaaaagggtgcagcttgtgagtttttgagaagtgttgggaggagagtcgttgttgtcccagttgtgagcaggtggggcttttctacctgtgtggggaagtgtggtagctgatggatatggtatgtggattttgtgtattcctacgctgcttggtttagctgggtgcagttttctgcatttacctggcgtttcttgtggatagaatcacatataagcaaatcccagacttgtgttgtgatcaaattgttccgtaatatatcaatcatgttagaacaaggtcacggtttcaaaaccggcattgccgtagaattgactgtgtaataatcccttcaacacgttcacatctatgatcccaccttgttcttgccaccatcttagcaagcaggggtgcgattgcctgaccatttgtttgttttctgggaaatcttgacctattaaaagccacacagttactgaggaaacctgtgtcagaccttgcctaggtctgtgtgagtctgagtcaggtttgctttcctctgaaaaatcagacactcatgtatgtgggacaaagagcatcagaaacatgggcaaggtcatagagacagatcccagagactggattagaacccaacttgcttgattttctgcttagaggcttcagttcaccattttagaaagtgcctgctggctgccaccctccctcctgtcttatcacctctaaaagacattgttaatgcttagacaggatgtgttttcttcattgcatggatctaaaaacccagccatgagaacttagtttttaatttttgccattgctttattggatattttagaatgtgcaaaaggttttagaaattgtttttcaactaattttaccagcacagaggtcatgtcaaatgtcagggtgtttgacaacaaggccaatctagtctatcaattgagtttcagagaagattaatgataaagggtgcaatcccaaagtctgggaatgactttgctttcaagcattaattattgtggaaaataaaattattagatactcccttgtctacatctaccccaaactatgtcaatcagctctatttctagaaggtttacatttattaaacactccctgtggtcaatgcaatggtcaatgctatggaagttacaacaagacaagatattgtgtccgctatcaggaaactgatttgggagttctgtttgatgaccgaagagagtctttaccactgtgcctatatttttatgccagaatatgggtgggtgcacatgtacaggtgagtaatgaggccccactccctagtattagttaagttagcaggtgtgtgctgtttttttggtcactgtgtattgcaaaattctgagtttggcactgatactaaggaacatcttacagaaaaaattccccactgacccttcttttttttttctttttgaaacagaatctcactctgttgccccaggctagaatgcagtggcacaatcacagctcactgcaacctccgcctcccaggttcaagtgatcctcctgcctcagcttccccagtagctgggactacaggtacacaccaccacgcctggtcgatttttgtatttttagtagaggcagggtttcaccatgttggccagggtggtctcgaactcctgacctcaagtgatccacccaccttggcttcccaaagtgctgggattacaggtatgagccactgtgcctagccagacccttcatttttaaaagttgactttatatgttaataggagtttaattatagtcatatgttgaagggtcttttctgtaaaaccacatattccaggagccatccaactgaggacagcattgcacttgtggaaccacaatccaggcttgggttatctgtttctatcatgacagaggctactccatcacttaaactatatgttctgcagcccccgagagctgaagacaagcctggattgcctctatttgtaattttcttttttgtaaatttttttttggtaaattgtttttcaaacaaacaacaaaaatgactgtcccagtcagttcaagctgatagaacaaatggccatagaccgggtggcttaaacaacagccatttatttctcacagtgctagaggctgaaagtctaaaatcgaagtgccagcatggtcgggctctggcaagggccttctcccaggttgcagatggctggctccttgtgtcttcatgtagtggaagcagggctagctagctctctggccactacttacaagggcactaattccattcatgagggttctacccccatggccaattacctcctaaataccccacctccaaataccatcatgttggagattagatttcaacatacagattttgatagggacaaaaacattcagtctataacaatgatcaaataaggttacaaaaattatagtgtatgtagcatgcttgcattatgttttgatgaattaatgttttttattatgcataccaaagaaactaatgcaactgctgtaaatgtataaatatttgggagtaatgttaaagtttacatttaaagccctttctaaatgtgaggccgaaagtattccttttctctctctttctcttctcaaccccatttactttacagaatgatttttctgttttaagtcataattgctttttttttacaggattaagtaccaggtcattaagtgtgttctatgtcagtttgacctaacctctctgcccttttcttttttctaaaggaattctttaaaaagaagaagaggaagtattttaaaataaacatttgactgccagaatgtgatgtaaacttcaggttcaattctacacttgatagaaatgaaaagaactagtgttctctattttgacatttagcatcaattccctttcagtgattccagctgattagtaagtgagactaaaatatcttactcttcctggtcagcatttaaaaatttaaacatggattgaaaatttctaggttatgaaatacagtctaggttcacctgtgaaggatctagaagaaataagactgcagacctggtaaattcaaatgtccactacttctgtattctagtcattgcaactcacctccttttatcccttatgttatttttattttctcagggaggcaaaaaaatttgtgagtgaaaatgaaggggctcttgggaaaggaaaaggaaaacggtggtttgcatttaagatgatgatggccaaggtaggtatttttatagttgtctggtttatggcatattgcctctaagaagaacactggttcttttctaaaggggtgaaaaaaatcttacattttgtatatataaaacacaaatactcatacagtatatacacagtatatctgtggtattgaaatttacaggggagatttaaaaaattgttcttagaagagttaaaatgaaaaataagtcaagaaatacagatttatggcaaaagacttacttgtgtgactttagcacttccaaatataaaagattgcatcctttttcattttcattctctggaagtgaaggggttctggtcaagttgtttttctcaaagtatctgtatagtttttttctaccaggaacatcaactatacattggacagaaaataagaaaacaataaatgatatactgatacaaatatagattttggggaaagacagaaaagcaactaacatttatttaacacttactatgtgccaagcactgaattgaattcttttataaagttatatttaattcttacagtaaagtaggaacatagatattattatctcctctttacaaatgttataccaactgtaagctaaatgtattcccataaagttttgtgaataaagttcatatatcctaactttcatatatatatatactcacatacaatagattaattttgtctgtttctacagtttaaataaattgaatcatatagtatctatgcatttgtttctggcttctttgatgcaatgttatgttcacaagatatatccacgttgttgtgggagttatacttcatttttattcatgtgttgtagtctattgtataaagatgctgtgacaatgtatttacccattctattgtagatggacatttgggctgtttctagttatgagtaatcttttttttttttgttcatttttaaaattaactcatacacaattacttgtcttctggtttgttgaaacaataatgcagacatttgctacaacaatgactgttaaaatggctggccacaaaatctccagcaatacattaatctgaagggcattcttgatgaagttgactaattttgccattttcatccaccttatagtatttcaggacagccagcttaaccttccttttcttatgcttattcttctttggagtggtgtaagacttcttccttttcttagcaccaccatgaagtctcaacacaagatgaagagtagactccttttgaatgttgtacccagacaaagcacatccatcttccagtttcttgccaacaaagatcagtctttgctgatcagtagaaattcctgtcttatcctagatcttggacttcgcattttctattgtatccaagggttcaaactccagagtgatggtctttcccataagggtttttaaagaaaatctgtgttttggtggtggttccactgcagaaggcagatgggaaaaaaagcgtgggtgatcttttgaacttcagacttgtctcatgctattatttagacaatagtgcctgtccagctcccacttcatcccagcatttgcatacatgcaaaattctctgccacattctcattcttcctggtggtcctcttgactatggatgacccaacattggagttaaatagaaagaaggccttttgcaaaatgattttatgacttgttgtcttctctttcaattaagctgaccaatctgcctctaccagaatgcagtgtctcatgtcatacaacttaccatcttgtattgaactcacctatttgtacacagactatcctggtagatcagaaggctttcaagacaggacctggaaataaaagacagaaaataaaatttattttgtttattatttttattatttattttatttaattattcatattgagtccttcatacaatgaaaactaattaaacacatactctgttccaatcaccctattatgtgctaatcccctgctttcttattgtgttatataataaatagctgtttctgagaggccagcatattttccataaaacaggggatcgataaacatttttttgttgaattaaattggtctggggttagtggagaacagggaaacaagtgaaacctactgtttccccctttgactagaaagtagtatttgctgccagagagacatttccaagcttactgcattgtaatgttttgaggtgggggataaacatcttgacaaatcaagaggttggactttacttttgtatttgactttcttttcagaaatgggcaaaattcctccgtgattttgagaacttcaaagctgcgtgtgtcccatgggaaaataaaatcaaggctattgaaagtaagtccttatcagatctcaggtggagaaggttgtcttagagaagtatctcataagcttatcagatgcctttgtcagtttctggacttttgggaagactagaaacaaacaaacaaacaaacaaaaaccaaatcaacaaaaactttgtttatgcctgctttcgtcactgtgaagatttgctagcacttaccaaggacaatactggggaccccactctcgtgttctaccttagtccaaaacattaccattctaacctggttttctctcctatacagggaagtcactattgtgcacaatgacattgaatcatcttacttggaaggcagagattttattttggcaatgaacatgacattgagaatatatactctcatgaatgttagacagtaatcaaaatgaacaatgttttaacaagtgaagaagtcttagtctgggcgcagtggttcacgcctgtaatcccagcactttgggaggttgaggtgtgcagatcacttgaggtcaggagttcgagaccagcctggccagcgtggtgaatccccgtctctactaaaagtacaaaaggccgggcgcggtggctcacgcctgtaatcccagcactttgggaggccgaggcgggcggatcacgaggtcaggagatcgagaccatcccggctaaaacggtgaaaccccgtctctactaaaaatacaaaaaattagccgggcgtagtggcgggcgcctgtagtcccagctacttgggaggctgaggcaggagaatggcgtgaacccaggaggcggagcttgcagtgagccgagatcccgccactgcactccagcctgggcgacagagcgagactccgtctcacaaaaaaaaaaaaataaaaaaaataaaaaataaaaataaaagtacaaaaaattagccaggcctggtgcaaaagcctgtagtcccagctactcaggaagctgaagcaagagaatcacttgaacccgagaggcggaggttgcagtgagccgagatcacactactgcactccaacctgggtgacacagccagactctgtttcaaaaaaaaaaaaaaagaaagaaagaaagaaaaaaaacgaagtcttaaaacctcattttcaaatctctgaagtagaataagcaatagtcatccaggagcttgctatctgaatattcacattgtgcctttattttgtagaatattcataggaaggaaggaaggaaggaaggaaggagaatatagccaatcaaaaacctatttagtttagtgctttaggcttagaataaggcaagtaaacattttaaaatattgtaaataaaaatagtaaattgttttttaaaataataatctaaaaaaagggataacatttgaaacaattttgagcacaatctttccatattctggtttctaacggtttcaactaggatctgatttccatccattcctctctagattggaggcaggttttcctgctggttaagtgtggcgttgtataattaaaatggaggctccatagggagataacacagctgatggatagcttgctgacatgattgggcatgttttaggagtggctaaccctcggttccctgtctctcaatatcagatgggaattattaagtggcaatgaattaaaatacatcagctcattaattgtatccccttccacacattcccagtgccatttctctcttgctttaatttcctccttaacacttaccgctatctaaaatgctatatctttaatttaattttttgatgtaatcttaattcattttatgttcatttctcccaatagatgggaaatttagttttgttcactcctgcattccacttggcacttaataaatatgtattgaataaaattacagacaaactcgctaaatgtctaccaatctaggaaaaaaagaaaggaatttagatacatcaaaaaagagaagacatcatggatttcttaggtttcaactgtacagctcaaatgtggtaggttgagaggcactgaaaaacaaaaggccatttggagcattacggtcctgatacaatatatatagtaagaactctgaatttggtctttgctttgctgcagattagctgtttgacttctagccagtcatttaactcctctggacctcagtctactaatttataaaattgtagggctgagtcttgatcagttgttagataaatcccaagaaatttgtaattaatgataggtaaatatatacatttgaaaattatttttaaagcacactagagcaggttccagcctatcctaatagtaatatcatgctcatttgtgttccaataggctatagccagtgaaacaaaaacagacagaattatttttattgccagaaattgcatgcagcaagagttacacatatgaccaccatccatcatgagtgtcacagtagaaaagacagattgagagctatccaataataaccttcagttatctcctctcttcttctcttcttctagtaaatttggaaagccacgctggaaaattgaggcaaatgtagattatttttctttccatatataatttatgatttgattagtttgtcatgacttcttcactgttaatggtgctttgtctcaactgtgaagaactgagctttattttttattttatcaatattcaccacaccaccatttattgagtaccaccatgagtcagatgctctacaaacattgtttcatttaatcttcagtgttcctgcaatgtgcacattaaccttcctattttatagttgtgattaaataactgtcccagaattagtagcagagctgaaatataaggcaaaatctgtctgggttcaaaacgtatgcttttccatgtgttaggctgctttctcctttagggaaggttttacatactttttctttttaaatatgttttgcaccagttcataaaaagtattctacgaggccgatggcaggatgagtagttatagattttcttgatcgttatcaaggaattatttttcattttctcatgtatttactttttagtgagtgatttatttaattatatgttttgtattctataggatgcttaatgtactgattttaatgataaccatgaggctttgggctatagtattagttgaaaaaatatgaaacctatgtaagaatatattattagagcactggattggactatcttataaaaagtaccctactaaatataggtaaagcatgtatctgtgatcacctttgaaactgaacttaatgcaaaatgggaagaaataggacatgcaatggattttctgagttgaggactttttgacccctaccacctctgtagtttggacaatctgttgaaatctctggttctgtttccacatttggggctactacaatatctacaacatcttgggtttaactagtcactatacaagatcatttccagctcaacattctatgatgtgtaagttacagtcagttttacatgtatatgtaggcatgtgaaattcattaatcatacttttgattgataaatcctcaaaaatttgaatgcaaaacagatttatactaagaggggactatataattgccttctcaaattctttttgaaataaagttggttaagtgtgtaccctacttatagaatacatatttaattataaaacggatataaatgcttttctcttaaataaatggccatttaatcttacaaaaggttcagaagtatcattgtattccatttcgacatcagaatcatctaatatatatcttatttaatcctcagaataagcctgacattattgattaactgagcaaatagtggatgcctaacatgtttctaggcactattgctactgccaaagacagcagagactctaccctcattgatcttacatccaaatgtgttaatgtatgtatgcttggatggggaagacagaatataatataagcaaataaataatgacggtaattgtggattgtagtaagtggcatggtcaaaagaggagctgttgccttccattcccaacagcctttctaatccacttttccccactctctgctcagtatctagataataccaaataagtatttttaaaatgtggctaaaggagtccaaaattaacagcctttactgagttttcccaaagctctgtccaataatttgcagaatcaagagcgggacccaaattagagtctaaaattcatactgtttccatcttgattccagtaagacctagatctctttattagtgtgaagcggattctcacctgatgactcccaactctgtttcacttaaaaaatagatttgataattcctgccacagaggatactgtgacgttatgcatcacttgggaatactgtggggttttactgtcacgtcagccttaaggggatcatgcctaaaactcgatggttgctcctgtggacacatcttattcatctcattgaactgtgtatttttctgaagcaactgcatgtttgtacccccaggaaatataatctatacccattgtgatgccaacattattattaagaccataaattaaataattgaatgtatttctagctggggattacaaatttttctcaggatcaaaatctactttttcctaatagtagattgcatcatcaaaattatagtttcagaaacctattttttttcagacaggaaatagctttggataggcaagccaaagcacagggcttaaaccttatgtttccttgctgccctaaggattctagaaaatacaaatcaaatttgtcacatttaattccctacccctaaatagttcgaaaaaattgtgcttcacattctagcctaacatgatggtatttatattgtagtcacacagcaggtcatttaattggtcttttcccatttagaaatactcatatttatctgcttgtcttattacccatctattcaagaggaaatgatgtgttatgacagactacaaattactttgccttaataataaacaaccagaaagagagttgaaattttaactttaatttgaaagaaacaagaatattcaggaacaagaatatgcttaagcataaagcctcagtttaatacgtatcagagactctgttttttggttgttgttgttgtttgtttgtttgtttgttttttgagacagagtcttgctctgttgcccaggctggagtgcagtggcgcaatctcggctcactgcaaacctctgcctcctgggttcaagtgattctcctgactcagcctcctgagtaggtgggattacaggctcctgccactatgcccagctaatttttgtatttttagtagagacggggtttcaacatgttgaccaggcaggtcttgaactcctgacctcgtgatccacctggctcagcctcccaaagtgctgggattacaggagtgagccaccgtgcctggctgagactctgtttttatacattaataatttactatggaagcagcatttatcagtctgattaaagaaataagaattggtcattatgggcatcaaatttgtgaatctgactggctttagctgattgatggatattatctatacctattgtttcagaaacacatattcattgcatgtttattgtatatatcatagtcttaagaaaattaattgaactatgttttacttaaagggccatatagcagtgtggttaagagagatctagatttggagtcaaacacctgtagctcaagactgcctggtttagaagcctggcttccttgtttactagctatgtagcctatagatctaagtctctgtaaaatgggaaaacaatagttcccatttcgtagggatttgatgatcattaaataagttaatacatatagatcaaattggtgtttgaaacagtgattcactaaatgttacctattattaatcaacttttgattcagtcaacaactgtgttaaagtttttgtttcctgattcatagtgggactaataatacttaacctcattaagttctagtggcagcataatgagttgatgctgataaagttcttggaacacataactgaccatcaagatatactagctattattattattattactcattttgcttccttacactgagagattaagtatgttaaaattgctattcttttcatttatgctcttttagtcacactaatcaggcatttctttttagtgaacatcagttttagttaacaacatccggtaggatagaaccactagataaaagggataaagagggaagatttcttcttttttgtttttgtgttgagacaggaaaaactggagttttatgacaacttgttgtttcattttctctactttaagatcttcatttgttttgttactgtgttttctcctctgctattgataggtctagtgtggaagaaactttgtcttctggatttcttagtctcttccacctgtgtctgggtctttcctataatcgttctagttttaatgaaatctattggcctgcaattcattttctttacacttaagattctgtaaagactcaacctccaaataaaatagttgtgaagccactctcaaatctgagaactggagtttggaagttttggactctaaagtatatttcattatgatgcttaagcatgttggaggaggggatactttctgaaacatcttaattcacttctgtcttttgcatttaagtatatttgtaccctacacgcaagaaattcatttgtcagggattgtgtgtaggtgctgagaggatgggccgtggcaataattagaaaaacaaaagcataaaaagtgaggaaggaagaaaggaatggtgggttagtatcctatatgcgggatttcatactggaagatcttacatgcgattccagggaaaaacttacattgatacctagtgaccaaggctttcctccagtaaatgagtaactgtaatgagtaacaaactgtaagtccactgccttcaataaaacatgatgagtgaacctggctgagcagccctcaggtagtcgttaccagagaatgtagataacggccatgaaatggtatgaagtcactgggagccaagtgggtgatcagatgtcctaggagaagcagaccagtgcacctggtgacagtgctgggctgggctgaggtagggtggggtggggttgtgtatcaaaaccacacacccttagaaaccttatagaactctgcacccctcggcaatgtgaaatcaatccaaattctcttgtgagcataaagaaaaatattgacttcaaaatcattgattttttccaaaatatccatttaaagattgacttcttaagtttctaaaaaaaaacctgccactgttttacaggaataagaaagatggtaggtaaagaatagacaaaggggccaggtgcagtggctcactcctgtaatcccagcactttgggaggctgaggcgggtggatcacgaggtcaggagttgaagactagcctggccaacatggtgaaaccctgtttccactaaaattacaaaaattagccaggtgtggtggtgggtgcctgtaatcccagctactcaggaggctgaggcaggagaattgcttgaaactgtaaagcagaggttacagtgagccaagattgcgccactgcactccaacctgggtgacaagggcaaaactccatctcaaaacaaaacaaaaaaagaatagacaaaggtccagaaatagaggtgttactgtcctgtgaggccggcctcatctaagtaagtagaggctggaatttgctacccatgaaccttccttttccattgataatgcttccccactgataatgtttcaaagccagaaggctccagaaaatcattggtcaatagagatgtttagctgaatgttagctgaatgggacagaacacatgggctgatgcagccagggactgaaggtgtttgttgttttttcttgggcaactgacaatgataatttggaagattgggaaagctagcaacttggtgctgaatcttaaatgaccgtcaaagaaacttttgcttttgtaaatctatgaaatctgaacctaagacttaacctcttcatttttcttcttccactctctgctttaagagggtgctttttttttctctctctcccaatgagaattaaccaatcactttacttttcacttctgggggcaggggtgagttgactgaacattcttgcctattgcctattcattccccaaagctgaagtggttttttaaaagtcatgctcatcaccccttcctctggccctaatgcttaacacctgtcaatgacttctccttacattttaaataaaattctcactctttaccatgggttgagaggccccacacactgtggtttggcctctccatccttatctgtcaccactttccctcattcatgtactccaactgcacaggcctgagttttattcctcagtagtcccaagcccttgccccttaggatctttgttctggctttttcctctgcttgagctgctcttccccagctcagcatgttgctgtcttttcttcaaacttcagatctctgcttagatgacatctctgatgttctttccttgacaaaactttctaaagctacccctttcaatactttcccttccctcctgtaggacctgctattatctctatctctatctcctgtcatctacatctatagctaatgtctatgtctgtatctctatctctgtatctttctatgtatcttacatatttgttgtatccatacctcactaaaatgtaagttctattatagcagcacccgtatctatgacattgtgcttcacatctaagataatttctggcataagatgtgtggagtgaatgaatgaatttcagcttttataccatccctgtaaaattccagtaatgggggaaacagcacagaactgcttgtaagataactatccgtaaaggatgtggtaaactctttttgagaagaacattgtttgcctgagaaaaggaagagaaaatagcagtaattataattatagtgatagctaattactagctaggcactgtagttacctttacatatatttgctcagttatcagtattaactcaagaaataaaatgcactctgcaggtggcaatcatggctgctcagcaaaaggcagctttcccttggatggactatgatggggtaggtcacatgcagtctgcataactgcattctacgtaccttctacattccacatgacagggaatgcttccatcatgattaacattttctcttcctgaatagagagaaaagaatgctatagcctataaatataaaaaggaccaatgcctcacaattaatggattcattttgaaggcaaccaagacaaagctctttttgtttgtttgtttgctttgatctctcttcaaactttttattttctttgtaataggtcagtttggctcctcagtggcctcatacttcctcttcttgagatggatgtatggagtcaatatggttctctttatcctgacatttagcctcatcatgttgccagaggtgagatctgacttccagtttacaaaacatgctgaaaaatgtttctcctagaaaagtatttatctcttctttaaagtagaataattaactggctattttcacgtcttagagtcataggatttgtaatgagattaaccttcaaaatggtgcccatgggccaaagctcccaatccttgcactaaagggggtgtaagcctcttgaaattatataacttatgtataatttcacatgtatgtttaaatgtgtatttttatgtggaaagtttcatggcttctttcagtttcccaagggggtccctgttcctaaatgttaaaaactattgttcaagaggaagactttgacaccttgtgagttgtatttctttattttgccaagttagctttgaaagaaatgcttccttaatgcaactcaaagcctccagattttctatactgaagaaacacaaaatgaacattttccccctaagatacaaagtaagataatgcccacaacacacacacacacacacacacacacaaatagtgggatgggatgagagtgggatgggatgatgaggtccaaagtcagaaactaaaacacatagagggtccaaatcaaagaagacaaagccctgagctaatgtggggaaagggtcagctgaggccaaaaagctagactgaggtcagagccttcactcatatgaagttaaatgattctgacacctttgaatgcttaccttacagaagttggattaggttttagttaacctacaaaggaccttttaggaccagtatttcaaagcaaatttggtccatacagcattgacagtggccaaaatttggtggttttgggtgactttttatcccgatagcttcaaatcagtgccagtttctatactaagactcctattaacataataataataataatgctttacattcataaagagatttgagcttttaatagtacaaagcactttcacttcttttacttactgtgcgtcacaacaaatttatgatgtagactgtagaagacattttcttcacccatttaaaacatgtaaatggagtcacataatgctgatgtgacttagctaacatcttggaatatatttttttattaagctgatctaggactagaacccatgattcaatccctttctctaagattttgcactttaatccactagttttataatccttgagataattccagagcttctaaagttgtctggctcgtagaagacagtgaccaaagatcagaggtcctgtgtagtttatttcccaagtgcacactttcaggtaatgaagctgaatgtgtgtattttatctatttcaaattaaccccagcttttttttttttttttttttttgcttacctttctaaggaaatctgaaactcctccattccatcactggctactatgacgttacttagtgtcagatgcaggtataaatggagttttatcagcagcatttattctttcccccacaccatgctgcctccatgtggagaaaatgaaaggctgttgctgatttatttgaataatacgaaattacagaatgtctgctatgtagtggatggagtgcctacgtgttaggttggatgtattccaagagctaggaagcattctgtctttggatacccttttataggttgtattaggtgctgaggggcatcctgttttctgggcaatgattaccaactccagcaaaagaacaagagaatggacaccctgcatgctgactttgcagaaccaccagaggccagggcagtcatctcctggcagcaacgctgtatttttcagctgcctctacccgacgggctcactcagtattcctccaaggcaaatgcccttttgccccaaggtcctgtgtccctgggcaagcctgagaccttgatctcctttgtcctctgtgcccccgaactttggggcgagacagtgtgtctggaacccaccttctattctgttcggaccaggaagccagatgggccaaaggcctactttgggaggttgtgcagcttgtgcacagggagtgagcagagattgatgtccagcccttgttcagtcaagctctgcacccaggcttcaagccatattcatcttctgttcccagctttaggagggaagtttccatctcacagaagaagcaacatctgcttggtaagctatgggggctagaaaggtgctctttccagttctcaccaaggcaccttcctatgaccctattcttgccctctcactggcccactcttcccagtactattctccctaccgtttttctcttccaatctggtagcatgaatttgaggcagcagtcctgaattagtgatgaagcagacaccataatcagggtgcaagtgttctcacgttgcagacacccacaaattacatgattggatttccttgagttctctctcttgacatgaaggacagaatctccctccaccctcactcctaaggggtattctcttatgaaagtgtgggtaagattgttttgttgagtcctatgtgactcaaaaggctacctctctcctttccagacttccaagtcagaacagtttggtggtggtggtggcaatggggtcctcagaaagccctctggggaatgtggttgacctgactgctggtggtcccctgaacttggaatgcagggtcctttgcactccctttgttcttacctctggatttagtagtcgattcccagaaaatgggaccccacatggagacccaaagagtccccataaaaatgtttcagaagggcttttaaacaaaaccatttgtgatcacatgtgtggctcagactttgtttctaattgttcactgctttctttgcttcttcatacagtacctctggggtttgccatatggcagtttacctaggaaaaccgttcccagagccgaagaggcatcggcagcaaactttggtgtgttgtacgacttcaatgtaagtgtctccacacaagtgtattggtgggaggatggatttttatttagtttattttattctgaaacccacggcctcctctcctgggtcaggctgaatgtcttaagaaagacgtccctgctccctttaagaaagaaaggaaagaaagaaagaaagagagagagagagagggagggagggagggagggagagagagagagagagagagagagaaagaaagaaagaaagagaaagaaagaaagaaagaaagaaacatgtccctttatataaatgtgactatgatttaggacaatggtaatatgattatatgggaatatagactactggataaaggtgagctcagagttcaaagacttgaagcaaatattcttatcactgactttggaaaagaataaaggaagagtttgcaaatgtgctttttggaaaatcttgttggattcctagggaattaaaacttttacacttcctattaacctctttacttcctaaacaagcctcctatttagtattactcaatagttagtactaaataaagctaaatattgaaaactaagaaatactaaattctaacttttaaataatactaaaattagtattattccattgtagtattcaaatgagcattactccttgagctcccttaggtagagattattactatggaaaggagttatttctgtccattgaaaaaccattttggactatatgattcaagtcttcgacaacaatgtaattccacatattctttttttaagtagtgactagactagaaatgtctggaagcatatgcgtgggaaagtagccaggttgaaattgaggaattgataattcaagtaatttttggaggctagacaatgagaataaaattttatacagattgcagaatgaaggagggaaaagcagactgcctgtttatagtgttaatatgtatatctcacaaacattttgatttctacttttaacctccttaaattgtgagtttcccaaagaagagatcaggtctgctacatcttttcagcccgtaatctagtcctcatccactacaggctaaatgaatctcattgactgaaaatcctgagtgagggggatgattcatagagccttgaagtaagaaccacaggaccagtttatgtgaggagtaccagaacatgcaaaccttaagaaaagtttcccatctccgaatgaacaaagcaagctattgagttagcatgaggcacaatgatagcaacaaatatgtggcatttgtaatcttcaatcacccctgtcagttggactttccatttcaattcagcattttttaaactgaattataaacttgcataggttttacaaagatgaatgtgacatgattcttgacttcagggtactcgtgatattagaaggaagacacgtaagcaaccagtatacaagatgctgtgcacaaagttagcaaaatttaaaaaaaggaaaaaagatcctggggaactgagcaagtggttcttatttcttcttaggcgggtctgggttttacagaagagatggcctctgagttggattttacctctcttttctatcacttctagattttatttctcttttctaccacttctaacttcttccacctcttcctcctcccctccctttatccctccctttatttatctctctcactttcaaatttcaaataatgcattactatgtccctttaccactgttttaatttctcattctcttcctctgattagcaaaatgacaaacttccagtctgcttaataagaacaaggacgaagatcactgactttttctgttttttaaggcatagcagagaaaggaaggactaaaaatatgaacaaaaggtcttttgatttttatatatagatttctgaagtttaaatacttctgaatttcccaatgcactgaaatggaaaattttgggcaaaaatgtccatttgagatttgaaagttagtgactcagttgaggaagacaaacagaaaagttgctgtaagagagttactaatgagtggacaagagggtctgagaggcaaattcaggggaaagtagagggaaagggtttggatgatgagtgtgcttcccaagattgtatcactgcccttgacagctctctcacatccagtttggtgaaatatgatttgtcggtcagcaggggatacagaaaccagagtgttctatgatagttatttcaaggcctgcctgaaaacaatactaaggcaatgagagaaattttaaaggtcaagaaaatataagaaagccattacactgattttattcacttacaggcttgctgcatgctggtatcagtcattaatttggtatgcatcattgctggggttagtagtgattttaatagctgtatttctccaatgtctgcatcatgcagtgaactgtgattggtaagtaaggtccctcacttcacaacccacttcatggtgggtatttatatctgagactaagctcgagtgttcttatatgtgaaatggagaaaataatagtatctacctcaaaaagcatcaagtgagataatgcatgaaatagcagatagctcagagtatgtagcacacagtacaggctgagtattccttatccaaaatgcttgagaccagaagtgtttcatatttcaaattttttcagattttggcatatttccgtatacataatgagatatcttgaagatgacattgaagtctaaacacaacattcatttagtttcatatacacctgtacatatagcctgaaagtgattttatccaatattttaagtagccttgttcatgaaacaaagatttgatggtgttttgactgtgacctgtcacgtgaggtgaggtgtggaatttttcacttgtggcatcatatcggtgctcgaaacatttcatatcttggagcatttaagagtttagatttttttttattaggaatgctcaatttctaaatattccttattacaagaaccataacttgaccaaaggcaaacagctattaggaaaccgaattgggatgcagggctggtggtattacacacggtaatgtatgtggatagtggcaagctagtaaaaggacttttattataacaaagaagtaaatacataagtaaataaaagtattctgaccttaatgaggagttcttgaaagattcaaggaaaggaagcaataggattatatagtcattatcaaattgttcattgaataacattattatttaaaagaaaataatactgctttaaggaattttatatgatatacaagttttcatgacttttgaagtttgaaagatttgtcttttgttttggcaatgattatattctaaattcagcaggaaagataggttgattcatattaagggacactttgcttttacatttttgtaagaaaaaggaattcagcccatcctacaataagctaataattgagcacattctctatactagggtcaaaataatttcacaagtacatcaataagagagagggaaggacctttaattattaaactgaagataacaacaagaaaaaaatgtacaaagcttaatttaaaatataggagatttggtttcacagtaaaaatccaaaagaataaagccaagtagtcactggtaataagacattatagattcaaatgagatgctgtcttggtcaggacgtggtgtcctccacggcagaagggaagaggctgcctgagcacagattgtcttgagtatcgtgcatagatggtagagatcagacgccacagacagccgtgggctgtccctttaagaactcccatagaatgggcagagatgtcctagaattggacaataaggaaagagtacaaggaaggaaaaataaaatctagccaagctcaaggacctgtatgtgttacctcaggttaaccagacgtttctcagaagacagaatctaaatttctacttacattgcttttgtttttattatcatttttgtgaataataccaaaattaatgtagactaagtacttatatgggcaggcactgtgcttagtgctatgatatttctatttatttatgaatattatactcatatatttatagtgatttatactacttgtttcagtatgcatcaagaaatggaaggcacagatatcttgacagagataatttaatataagaaattaaacaggtattgggtgactaaaaaggcaaaaggggacattgaggtaacatagaaatggtaacaggtaacacagaccagtttttacccctactgttgggagaacaaaagaggaagtggggttattagaatctaggggcttggaggaagggcgctgcatggccccaagaggtgtgatgagattggttttgagtgtgctcgaacagactggaaatggaaccaaataccgttaccagagtgaagaggcattgctggagccatgcattcaggagagagcaaatcccttctcctgactttttgtctaagtgcctcctataggaaaaatctgcaaggaatccgatctcaaaggaaaaaagtagctccccaagtcccgtctccagcatcacaaagcagcatatacaaggatgggtctgaagctgaaacagcttactaactggcacattattctatttatattatgacctattcctcttcctagtccagtaaggtagatatgactattcctaatttacagatggagagactgagttttagtaggatttggtattttcctccaagttccgtggatggcaagtggagaggctgggatgctcatctggtctgcctgacatctctgtctgactctgaagcctaggacaagctgcctctacataggctactaggagccactgagatggctacaggtttatactggaaattcacaaaaataagagaattttagaaatagaggtgctcttcgatatcttccatcctatatcttaccttataaagttacagaaattttgagttactgaagcatgttcagggtcttatagttgttaagaggctcctaatctagtgttctcttcatgtcctgtattccgcccgtaattttcctgttgtaatttccagcaacattctcactgactgctcctggaacatttactgactctgtttcatgatatatctatttcacaaggggaaatggagttgaagcatttgggccccattttaatctttcataataatcttgtaattcccaaatcagcttctcaaatagaatgagagctttcatgtttttttttcctaaattctttttgtatcatttaaatattatgctttattaaaatattcataatggaaaatcatactttgaaaattgttattattaattttgctttggttggttagcaaagttctatctttagtttttaaaattaatttatttttgaaatagacaataaaaatcgtatatttgcatgagttctttgcttgatcctctgaacaatgacttcatagaggtgctcactctgtattgtcagatgatctaagtatacaacccagtatacaacccagtattccatctatcatggcaccatggaggaaatcattgacaaaatgtttttaaactccttaaaaattcataatcctgacttttgcaaagcccaggggtgccaaagcaggcatccctgggcttttgaaaaatgccattatttaagctagagccgttatctaggctatcattatctaggtagagtttggggtgtgtgtgacctcaatatgaaaacatttggatccactctcttggatccaaagagatggcatctggaggctgtctctcaaaggagatctgagcagcacacccagcaacaggatcagctgaccttggacagactatatagaggtaagttattccacatagaggcaggtgaacagaagcagaatagatttaagatctgcacttacagaataatgtaagataaacacaagcatgatctcttatggtacaggagcctattggatgggaaggatcagaaaatctttggggtaaggtaggggaggttgtgaggaactaccaatctgtagagcttcatctgggaaccttggaacctcctctccatacccatgaaagcgcagtgctctgtgacttagatgtatatatcacaactcatccaaattctcttcagttaatagtagacaaacaccatacacaacatgcatgatcagctagtctcagggcttttcaaagtcagaatttaccatttatgaaacactgtatttttaaaatattcttattgagtgcataatgatacatcttactgatggtgctggaaatctgttttattaaaatagtaagaaacagagagattattatgtatgcaatgaatcaaataagcagaaattgtatcatgtaaattaatagaagcagaagaatgagtttaagtcagtaggaagaggatgtctttgttggcaagatacctggagagacaagggtgatatagaaatgataaagaagaaaaggctacacagttttaatattcttgtgaggagaaagaaggaggaactaaagtggaatttggaaggagcttcagctgatatcagacagtgagatcatatgggtaaaggtttaagttgtgagtaaagggaaatgcattctgcttttcaccttgagagcatcttgtacattgctgatggataaatggtatgtctactttgcctccccttttctgctgattatcatagatgtgggagatagaagatatcctacaatgggcaggagaggagacttaacacctattatgtgttaagtaggtacatacattaaattttatcctcataacaactgtttaagatggaatatatcatcccagattattccttctgccctgcctgcctcacatcccatcttggaggtttgtccttaaaggagacaggttagacacatatagaatgttaataaaaaggagataagttctttaatcaacatcaacaactcttttcagtaataatgttccaaagtaaaggtgtcttctctcaaacatatctcagttctcttaagttccttcatctcttattgcactggacacaggtagaggagatattttgtgattcacacgtggaataacacatcttttgttttagaactatttcagtggttcgaatgcatctttatttgaaaaggtgaatcattttaggtttcctgaggtgtagacatcaaaattatgttacatgcaggagatattgggggagggaggcgtgtgaaggataaaggagagagtgaacaagagtagacaggaagagcttttagatggtaatgcaggccctatacctgtgaaaggagagagaaaaggaaggatttaggaagagtctcagattgtactacagttttgaaagagtcttggccaggctaacggtgagtctctaaacaaagtatgtccattagataaattccatattggttagcaataacccagctccagtatttcccatcatgctcagtcattatctaggtagtggttggggtttgtgtgacctcaatgtgaaaacagtttggtccactctggtgggtccaaggaggtggcatctggaggctctctctcaaaggagagctgagcagcacgcccagctgctaccttgaaaatgtgactgggctcctccactttagatcatagctgttcatattgctgttgttgctgttatttagtttcaacaggtttcaaatgcagccagaatgacctgtttcccacatccatcgtctgggcctacctccgtgctgggtcagcagaggctgaacttctagatcatgaataattcttcggtggcatgaccccaagcgagactgctaagcctcttgtggacaaatttagagttataaattttcaaatccacctagagatacgtctctttccctagtagcagagatcataactttggagggggtgaggaccctctcatctgtggatgtagtgagattcctccaatggctttgctgagcagggtgggctgctgctcaggcatgtaacgctgggactggcagtatcaaagggctctgtcccttatttacttcacttcctcaatgtccagtgtgggtctctttggttcaacaggcttattaagtttgattaaaagaagatgcatttcatgttctattctaggtcctagatcacttcttttgctttgtaagcttcttaatttgctactcctgagtgactttatgacacagctctagcttgtgacgagagagattcctgggtctgcttttagcttccttggtattttaaacttggggaactgatttcttaaggtctgaagtcctagcgatgccttttttttttttttttttttttgctttagtaacacattttagttttcatcacctccctcaggctacacttggccaaaccaaaagtgagcttttcttttgcaaatattagggatgcatatgatcctaatgctatacttacaatatgaaaacagcattccttctttggaagtgaccatagaaatgagtcttcttttcattaacatagtaaacatttgttgggcatttgccaggtgccaggcattaagcaaagatgagaaaacccaaggtctctgtcctcaggaacataaagtccgagggagtagtcaaataatcacaaaaataaatccaactgtaattgtgccaagtgctatgaaggaaagctatatagtgttaagagaacttatagaagacaacctgatgtggtttaggagctaaaggaaggagacagataaaagaaaatatttttctctgagaaagtaatgttcaaattgggctctaaggagtcaggacaacctctgaatttgaaagaagggagagatattctcagcagtaagaacatcaattacagagaacgtgtgatgataagaggtggccttattcaggggactgagtaaaacgagagagctcagaatgtgaagggacatcagaacacaaggcattggagagacagaagggaaccaaagcacgtgggatcctctaaaatctagactgcactaattattttttttttttctcagagcaattaaaagtaacttaagtggggggtaggtgggtagtaacatatcagacttggattttgaggtaatcaacagactgtagacgggcaagatggctgtgaggagatcaaggaagaatctttcgatatgactaggttagagactaaggttggaagagctaaatttacctggcaggaattttctatatctaaatattggctgccaaactaatagattaaaggatgagccattgagttaggttagaacttcacaatgcattaaattatagtcaataatttaaacacatagcaccaaatcataaatctaatacatctgtggtgacaagtagattatgtaaatctacattcatttttttccaagtagctgcaatatattctttacattttaaattattttatttgttcaaaaactcctttttaaatacataataccaaggcatctcccagtataggctgtgtccagatgaccacacacgtctcgtttcatgtatgaattcacaaagcttcactctgaatattttaaagaaccagcagcaaatttataactccagaagtcaaccagccaacaaaaccctctaatatgcttttaatctcctccttgcgaaatgaaagaagacaacttttttttctttgtggaaagaaattatacataaaagctcattttatagcactgagactgtctcattttgttaagagttttatgcaattagacagtaggaaaaattaaagagtttttccagtttcagtgtctctcagacacttctttggtgttttgattcattaaatcccaacataagattattattgccacgttactgtcttggatgatttactctattttattaaaatgggtagcagagagcagaagaataaaaaaagttggtgtacatgacaatttaaaggagcttattctaactgaggattgctaatgattaccagaagcaatttttttttgttcattcaatcactccacaaatataaattgaagtcagatgttgggaatacaaagacaactaacatatattccctgcccacagggacattatgatctaattggatatgcaaacaaacaattgccatgcaaaatgacaatctgaggctgatgtacatatgtcttaggcacttgggaacataatggaataagggttcagtgtccgggttaactggcattcagatactggactcttgagagagcccagtaaagagaacctctatttcccatgtgagttctgaataatttgtttaaaaagaagaggcagatgggcaaaaaatttttccacattcattattaatggaaatcgaattggaggaacaatccggaattcttagccaaatggtcttgctgatttagaaccccaaattagccattttacctctagggcaacttatttcctagaagaagaaagatatgtttgggctgggccagcccagttaattctttcccagtttaccaacagaaatcactatgcctttcctggtgtgcagtgagtatagggacagagaaaagctgaggcatattgcatcaagtgaagctccgtgcctctgaaggaaatgctgagagaaaggaaggggcattcattacccctatcacaactggctgtggttgagaggtcaacaaaggctttacaagtatcttgaaccagctttaaagaaagagtaggaatagagcaggctctagaatggggcaggcaattgggaagcgaattccaagcagagagatcggcatgcacaaaggcatggaggcatgagatagtgctatgctctcaacacccaagagtgattcagcaaagttcatatttagggagaaaggagggcagcaagaggtgagcctgtcatactaaaaaaaaaaaaaaaaattcaaaaaagagcctgatcagggagagaatttcattatgctcaagtcagactttatcctataggcagcggagcgcacctgagataggaggaaggagcaggtttggggaattttcttgaatgtgctatgttcatgcttcctatgagacatgcaagtggagtgagatgtgtaatggcattgggcatagggtctagaattcccactgttagtgtcagtcgtgggccatggcacaaaaggcaaatggaagtactttctatagaagccagaagagttaaaaatgcagtgtagcataatgacaaaaactaggcatgagattccaacaaacctgggtttgaatcctgccacatacgacctatgagatattagacaatcatcctgaaccttgtagttgccatgtataaaacagcagtattaatacctagctaccaggcttgtataaaaaatacatgagattatgtgtgtaaagtattagcacatctcggctgggcgtggtggctcacacctgtaatcccagcactttgggaggccgaggtgggtggatcacaaggtcaggagatcgagaccatcctggctaacatggtgaaaccccgtctctactaaaaatacaaaaaattagctgggcgtggtggcgggtgcctgtagtcccagctactcgggaggctgagtcagaagaatggcatgaacccaggaggcggagcttgcagtgagccgaaattgcgccactgcactccagcctgggtgacacggtgagactctgtctcaaaaaaaaaaaaaaaaaagtattagcatggctctggcacatagtagattcttctttaaatgcctcttcaggatacttagctcatgaaaattcccatttgttggagggacaaggaaacagaaggaaggaacttgtagccagagcaagaaagtggaagtggggcagcagccatgtcccctgtgtaggcaggaggcagggggacaagagtaccaatgcaaggatggagggatggatacccaaaggaactgcctcattcacagctgcttgaggggcagagatcactgtctacagtccttaacacaacttgattccctctgctgaaaattagatctgcctaggctcagctcagcttcctctttgtactccacactgtctctgttaagaaccatagagcacctgtttcatgtctatgaatctgggttggagcaaaaggaaaataaaataaaaaaaactcagagatgagcaaagtattaggcagaagcctaatgggtctggctggagaggaggagtgtggccatgcgctgctgtcagcatgcagctcacaaggcccgggctggctgctgttcttgtgacgttagttgaggtttattctgggcataattagccttttcactccttgtttctttcctgtgttgcgtcctactccatgaaatgttgagtgccagtccttgtctttcatccacacttgaaaccttcgttcatgctaaggtgtaaataaccagcaacaactcagagaaaagtagaaatacacccagacttgaatcttgcagtgtcacctcccctcacataccctcagcagatatgcttaaaaaattatatcttcctttcctaccagttttactttatacattctttcaaaataatggtctggcagctattacaaattaaaaagagttactaagaatgaagaaattcaatgatcatcctggggatagagtgttatctttcatggtgaacatttcttggtaatcatgagaaacaccaaagggatgcagttttaatataatttcaggcaacaaataattatgaaggagatgttttgcatgcagagccttttggggacctctgaaatcctgtctcctaatccatctatgtatattgggcaaatagtaagttctcaataagtgttagttagaaaagtaaatgcatgaattgagtcctggtaaccataataaaaacagtctttcttgtggaaatgtgttggtgattatggactggaccagctgcagcaatcaaacagaaattagagtcttaatagacaacacacgagcatggcaccccagagttggacagaaattttctgtgctcactgggaacttggctctgactctggtttctctgtcacagattttggggtgggagagtgctcccatggggaaagcagcacgtgctgatatcgaaattgaatagaaccttggctgggctaggagtcattgctattttagtcacttccagatgtctgctgctgtagttttaagggacagggaaagatgagtggagtgtggcatgccactgggtaaaagatgaggagcgttctccttctaagcccttcaagttgtatttaaagccatccctcaatatgctacaaagatggattggataaagcctttaaaaactgtgttcttctattcacaatagcaaagacttggaaccaacccaaatgcccatcaatgatagactggataaagaaaatgtggcacatatacaccatggcatactatgtagccataaaaaaggatgggttcatgtcctttgcagggacatggatgaagctggaaaccatcattctcagcaaactaacacaggaacagaaaaccaaacaccacatgttctcactcataagtgggagttgaacaatgagaacgcatggacacaaggaagggaacatcacacactggggcctgttggggggttgggggctaggggagggatagcattagaaggaatacctaatgtagtgacaggttgatgggtgcagcaaaccaccatggcatatgtatacctatgtaacaaacctgcacattctgcacatgtaccccagaacttaaagtataataaaaagttaattaattaaaaataaataaacaaaaactgtgctttttaacattcatttatagatttgacttcatatatatcaaataggcaaactgcagaaacctttgtgaactaatcatgactctgcctgccccaactagaaaaacaaaacaacacaaaacaaaacaaaaccagaaccattcttgggctttggttatgatctagtatttatgaagtgccagccattaaacatatgttgaatggtacctatgccagatgagctggctgcccccagtagctattgtgctaacctaacaagctcaccagatgcttgttctatatctgctttctccttttatgatattttcggtgtgtcttttaatcccaaaattgtcattatgaattagataaaagatatcaggtggggggtgaccccctctgaaatattctcaaaagggatgcctggggttctttccaagaggccctgtcaccaccagggaccagtctagggtatagatcaaagtctgtgatgggttcatagagtttcttgtttctttcctttctttcactgagaaggtatggcactagcatgatataactcttgctggataaagaaagcacaggagaagcagtatagtgcagtggttaagcatataggatttggattagactcaggtcaagttcagacactgtcactcattagtcatgtgaacttggacaaattacttaacctctctaaggctcagtttcttcatctgtaaaataggtatagtgatagcagctattgaatttttgtgtgtgcaggagaggggaaaattatggtaaataataattcctcccttgtccaacaagattgtgagctcaccggaaatataacaaagggtaagaccagtgaaggtcaacatgccgcctttattattgttaaagctgacataaaagaatgtagtgtctttatggacaagtgaacttcacagccagacctctctgccaggacaggcctctccttgcaggagcagagcacagcatgttccctctcaagagaaggaagagatgtccgcatgtctccatccatgctctactgtcaaatcagtcacttttccccgaggctagagtgaggcagtggagggtggctgggagtgttatgttaatgggtcttcacttggaagggaacgtcaagagttggagatacgattaccctagtagcagcaacttcatagtgttctcctgaggattctgtgagataaaataaggtgtttggcaagtgctaaatgttcacgaaatgtatacggtgatgttacttgtcacagcaaccattatcactgagtgtcacatctgtggcaaggaaatagggcaatgaaaaacagagacatttggaagttgtggtgttgtcccatgagggttaaataaagagttcaggatataatctttaaaccaaacaagagattaagtgtctatacttagcatgttctgttattgtcaccctgggacagaggaacaagcatgaaggtttaagacatgatagaaggagattggatttaacacaagtgggaagaagcagagatcttaactagataaatgtgaaacaagaagatgtcatgcacctgggagctgggagatcctcccaagcatattctcctgggatgaagatttctgggtcttggggagttggtcaatccatgtcttatcttagacatgagattagctcacccactccctctgcttgaggtttctactagctgtttatccccaaatgttctgttggatggcatcctagtcagggttctccagagaaatataaccagtagaagatatgtatacacacatacacacatatacatatatatatatataaaatttattatatcaatctagtatttatataataaatttattttgatttatcattattattacttaaatttattatataaatctttatatatatatatatgcatataaaatttgttgggtttttttttttttttttgagacggggtctcactttgtcacctaggctgcagtgcaatggtgtgatcttgggacactgcaacctccacctcctgggttctagcaattctcctgcctcagcctcccaaagtgctagaattacaggtgtgagtcaccatgtctggctgatatatataatttataagttaatataaataatagatttactacagatataaaaggagattcattttgaggaataggctcacacaaccatggaggctgagaaatcttctaacctgacatctgcaagctggagatccagagaaaccagtgctgtaattcagtctgaatctgaaggcctgagaaccaggggagccaatggtgtgaatcccactctgagggcaggaggagatgagatgtcccagctcaagcagtgagtgaggcaggagaaaaaggagcaaatccctccttcttccttttgttcttcctctttttgtcctcagtggattaaatgatgtccagccatgctggggagggcaatctactttactgagtccacctatttaactgctcatcttatccagggacaccctcccgggcatacccagaaacagtgtttgatatggacaccccatggcccactcaagttggcacatacaattaaacatcacaagttggctttattttttcttaaactgaaaaatgcagatacaggcctgtgtggcccagggaaacccagacctttggtatttacctgtgattcattccgtgcagtcccgagttaagcacacaagttcctctgagattatttggagattttattttgttctagttcttaaagagtacaatatttaagaaaatttgccccatattttgaaagcaatagtttttcagatctctgttggcctctgatttgagttaggcatgatgtttgtttaaggcaattttctaaattacttctcttaattcttcctctaggaattagcatctacgacatttctactttcttttccacacctccactctcccccacttcacttcccttcttcagctgtgagtgtcaaagtccctgggttcgtataaatgatgtcaaaggcaaccaattgggttttctaagattcagggttgactcacctgatctcaagaggaagccccatattgacaagtgattatcttctcatttcacaaaacatagttattgtcagagagaagtaagaggggagctggggagtggatagctgtagtgatacagtaacagtgcttcaatgctgaaagtgaaaaacacagtgaatgtgaggaagagaaaaggtgcatattataaaggaagcagcatcagaatatgccaatgttctgagaataaagagggagttattcaggtggctttgagagagggtgatttcaaccctggcagataatttttaggaacgagaatctaatgcacaagtaaacatgcttgttatatgggaatgctgtgatagtcttgatgaatgggaagtgtgcagatgagttccaatgtcatcccacctgctctttgatatttgtgaagtgagagctgagacataacctctgtggtttaagaagaactgatctaattatggtcaggtgattggaaatggaaatctgccacagcactttgaggaagcatttttcagatccccatcccctagtattaagcaaactcttaaaatcgtaaatctaatgataccacgaaatgtgttttgatgtttaaatcaaagggcatttcacggtaatggctccacagctgagcaagcctgtatttgcttaaaaattttatctatttagaagtcactgattttcaaataaactgaaaagctgccaatcaacatggcagctgaaacattcactttatggagcaaaacaatagggctcatgtcagagctgtgacccaagtttgaaaattaatgtcattttgttatttctcttaagagttgatcttttcctttgagttgctcttcacgacaactgctaagtggctttgttgttggatttcagggtttggcacaatattccgttctcttttatggctattatgacaataaacgaacaattggatggatgaatttcaggttgccgctctcctattttctagtggggattatgtgcattggatacagctttctggttgtcctcaaagcgtaagtttcatttgtcttttgggaagcaaataatgatttctggaatcaaatggagggattaatttggggattggatataattttgttgctattttatgtctaaaggaaacagagtctgtaagagatgaaatgtagttttaataccaacactaatgttagactattacatcttcaaaagaactgaacataaacacaggcctttgagtcatctcatggggtcagaccaatgcttgcatgcctatcttgtgtttaaacatattttttaaatgtgtatttttgtacttgaaggtgtgaattaatgttgccagcaagacaggaaaacagctgctggtctctcttttgcgtgcagagaggtttgtaacttgcagaatcagctcaataggcagaatctattgttctctgctcattttttaaaaaaaccagaataatcactcattcaaaaaattttagctgtgtaagacagcaaaaatgaatggtccccaatgaaaccatcacaatcaactgtataatcatggtttgtcttgggaaaagatttattggagtatggggaagaatttcactggagaactgatattactgcagttcatttttctccctgcctaaaattatttataatactccacttaaagactgcagaagcctagcagagttatttgggtttatatattaaaaaaatgaccctttagccaattttttttgaactagtttacgagaagagttgaaacatctcaagtaaggttgccattcttttatttgactatgtgcaagttgaatgagcttttcccctcattgtaggaggtccctcagcctgagggtctaagaggggaaaagtgcaaagtcaccctaagcaggagctctctgaagcagtctgtgacacactttgtgtcctaaacctgcctcacttacttgttcctccagagaaaactgccatatttcatttttaagctcttttaggacttaaaaccttataggaaatcctatatctaagatatttatcaacctgctaaagtgtaatcagagacctcaaatataagagactgtccatcagataaactactatcacattccaaaaatcgaagatattttctagtcttttgactatattgctctggttgggctgaagtcagaggtatcatttacattactgaggcctcatgagtatcatttctgtgttgctcctttagtttctgtggtcagtggagaagaatagtttctcatgtctgatgactcagcttttattccggtaactgtgcaggctgtgtaccccacagccattctgcctaggttcaaatcccagctctaccatgtatgtatttatacaatcattaacagatggctcaactgctttgttctcctgtttccccttggtaatagaggtgtaatggatgtgaggactaaatgaattaatacaaacaaagcacttagaatatgcctggatgagaaaattattcaacaaatgttaacaattttattaggctatattttattaggctatattatattttattagcctataattcataggcttatttaagaaaaaaagccagcatggtaggagttgaggccacattatagatccccaaaacaaggcagtcatgtatggttatgcagttgtacatcagtagatttgtatatttaataaatgattttctggcagatgaatttaaagtatctagagcagcattgtgccaggcaagccacatatataagtttaaaacttctagtagtcattaaataaatagacaggtacatttaattttaataataaatatatttgctttaactcaatatatcaaaagtattatcattttaacgaacaatcaatataaaattattattgagatattctctgcctttcgaaaggtatcaagtctttgaaatctggtgtgtattttataccagtcgcatttcaattgttcagtagccagatgttgctggtggaacactctgttgggtagagtggctctagaggaagtagtggctttttcaaagttgctcgaagatgccatttgggatagctgcagggcatcaaatccacattttccccctcaaagtcattcatgttatatcatccaaaccagtgtggccttgaaccttccctctggcatggacctttggctgctccttacctggttaacaagtagttcaaactcattgcccaaacagcaagacaactcaaaaacaatacaccactctcactccaccaccagcccatgggagaatattcagtagaaaaagaattgatgagatataaatctttgtacagaatcattaatcatctcttcctactcctatcccagtcaaatattctcttggaataagtttgagcggatttatgacatacattactcaaatggaatagaaggtaacctaagttctaaaatcgactaggctacatcaagattttttcactgtactcattctgttagcgtctgcatactcatccacaaaatgggagcaaatatctatttttagttacttaatagcaaaatcagaaaataaaaagatagaaatccaagaaaatagtttgaaattttaagataagatgactaactttgttggcccaggattctcctggttttagaactgaaagtcttgcatttgagaacctttcagtccccaacaaacatggatggttggtcaccttggttttaagtccttcccttttcttcttcctcccttcattcatttcttttatcctttttttttttccttttctttccaggtcagtgtacattttcaaccacatcatatgcttagaaatcttcatgataaatatagttacataagtattaaaagcaaattaaaacagtataacataaagttacacaacatggaaaccatcagctcatttaaatattgtcctcattagtttgaagttttatatcataaaataaaggtggcttgacatcagaacccaactgttcccgttaaaaacaattctctaagctaaaaatttggggttttactggtctattttacagcagctaaactactggaagcagttgaatcattttgagaatgcatgtcttaataagaaactcatagctattttatccttgtaggctttttcaagactttttcctgtttgtaggatgttttagtccatttcgtgttgctataaaggaatacctgaggcttggtaatttgtaaagaaaagaggtttatttggctcacagtctacagactgtacaagaagcatggagtcagcttctgcatcaagtgagtgattcagctgtttccactcctggtggaaggcaaaggggaaccagcatgtgcagagatcacgatggtgagataggaagcaaaagagagatggggaggtgctgggctcttttaaacagccagctctcgtgggagctaatagaataagaactcacttactatcccctgcaaaagaaggcattaatctgttcataaagaatcttcccctatgacccaaacacctttcattaggctctacctccaacattgagatcaaatctctacatgacatttggggagacaaacagcgaaaactcagcacagggctccctgggattagatataatttttctgtttatgatcctggctataataatactcatagaatggactaacaaatattcttggatacttaaatcatgtgctatacgtaacccttaaatggtgtcaaaatttttgtctacatagactataatatagattatatatatatgagatatatattataaactacatatatcacaaaccaacctcaacacatgcagataaatatttttaaatttggcaaaatgacagtatgttcatccatatttctggagctgcaacaataattataaattatacttgaaataataataattaacatctgttgagcatctctcatgaatcagtttaaattacattacttctaatccctaaacattgcaaagtagctattagttttataattttacagataatgaaataaaactcagagatcctaaatgaactgcacaaggtcatttgactataagacctctttgaatttagagttttctagttcaaaagatatcttctaccccttacaccttgccacctctctgtactgtgcttctccttacgtaggccaaggtgttcctcccaccaatcttatatactgtgttgagtacccattagttattcctattggatggatggagaaattaaggctcagcagagtttgaggatttcactaagttcaaatgcccagtaatttgcataactgaactttgaacaccttgctttaatttcagcacttagcttttctaatttctgatgtggattcatctatattgatgataacaatcatcaatatagactgatgtctctgtctcgtcctgggtagcctttttatttttaaaaattctgtattaaaatagtttcttgtctgttgttaaattcccttagagttttatggccttgatgtgactcatgtgaccaaacgttttgttaaaaaaaaaattaaacttatcaaaaccaagtccttgttctacaagactcttgcatattccaagataaatcatggccagcttcacacacaccatttctaaatcaacgagactttattttcttccttctacttagatgtcagtgcctttgtccattttcttttcacttctttggtacatgtttacccagacagttatgacctacctgatactctgcctaaatatcttccatgtctcttgacatccttaatttcttaacattgaaattgtttctttttcctccccattttcccacccccaattaatttttttctttgtcgaaggaatttctccttatctatttagtagaaagcagtcagagtgcctcatagaccccagtctaatattttacttctcagagatattttcattggagatcataatgtttgatgtatgtaatgatgaatttcagaccctagagaaagttatggaagggtaagtggacctggcctacagggcatgatattctggcaaatcccacaaaacatatggttatctcatcttcctcaaactatagttgaccttatttcaaaaatgcttggagcagaaaagcaacgaggtatgaaagacatgaagtcaccaccttccattttatattactactctatgaattgcatctagattttaaaactcaacataaaaaactgtcttcttgcaagcatggactaataaggatagtagtagttcacaaagaatggcagctatttacaaagtgaggtgatattgtcaaaacctatcataatgacaaagacagaactaaacagtgatagaataacaagcatatgtggtatgcatttattatatgtattgtgccatgcaaaaaagcaatttatgctgtatgtatttacttggtgaggctctttccagtgctaagtttacttctagaatgacaattcatgtattcattcatttgattactatttgtggaacacctagaatgggtaatctaagagaactatccagtacctgggtatttcatggtgagcaaaataaagtccttgcctctgtggtgctcagttggggaaatattgtaaacaaagaaatgaccagtggttttggccaatgtagtataattttatgttgttgttatcctctgcagtcaaatatttgctacagcttcttcatcctcaagaattttaaatagttgagaagagccaagatggctaacaagatgcagccaggaagagcttctcccaatgagaaaccagggtattaagaagattggcacactccaagtagatcttcagaagggaggcattgagagtggatggaggaaggatgtagactctgtgctgaagttagaggaagcttggaatgctatgctcaggaatgagttctaggactcattcctggctccgagtgtctcctaaggaagggagagttaaataggcgtggagtagcccactctcaccatggacctccataattctagctgcaggagtctcaatgacccccatggatatttgaactgatagggggagctgcttgaagagttgacagggacaggactgcagactgtgtggagttcagaggatttggcaaaggaaggactgcagtagagcacagccaaggacacccatccctgaagactcaccatgcccctgtaggctttggcctttgttgactgtcagaccaatacagagcagggctgtcttgcccatggaatgaggccattctgatctgagtgcctcccttgtctgccagcctttcctgaggttcatgccaggctgtgcccacttgcagcacaggcttggatgtccaactggggcacttcctaaaggccatcatcatagcttctttgttggcagaccccacccaactgttggagagcttctgaagacaagcctccacccgcacacaaccacctgcagcctcccccctctgctttgccaacacgcaggtatgcatggaccctgctgctctgctgccaccaacacatgagcacagaccccactgccactgccccgacaaagcactgttgccagcaaccctcatggagcattgttgttaacagactggaaacacctcagctccttcagcacagcaggtgtttaaccttgagaggccagagaacaaagctgtgtgcctggtcctataccactgggttacagcacacagtccaggagtgctgagctgagcccaggtcccctgaaatcagccagaaatgaagccagttgactagacctaacttatatcacagtcaaaacctcaaaggcatcaaagaattgcaactttaaagattaaagaaacatcagctcacacagatgagaaaaaaccagcaaaagaactggggcaactcaaaaagccggagtgtgttctcacttccaaatgaccatgctagctccccagcaatggttcttaatcagactgagatggctgaaatgacagacatagaattcagagtctggatggcaatgaagattgttgagatttagtaggaagttaaaacccaatacgatgaacctaagaatccagtaaaacaatacaagagctgaaagacaaaatagtcattttaagaaccaagctgatctgatagagctgaaaaccccattacaataatttcataatacaattggaagtatcaggagcagaacagcccaagctgaggaaagaatctcagagctcaaaagtggttcttcaaattgactcagtcagacaagaataaaaaagaaagaataaaaaggaatgaacaaagcctccaagaaatacagaattatgtaaaaagaccaatcctatgactcactgacatccctgaaagagagggggagagagaaagcaagttagacaacatatttgagggtactgcctatgaaaatttccccatcctcactagagaggtcaacattcagattcagaaaattcagagaacccctgcaagatcctataaaagatgaccatccccaagacacatagcccacagattctttaaggtcaatgcaaaagaaaaaatattaaaggcagctggagagaagggaaagacatctataaaaagaacccatcacactaatggcagacctttcagcagaagcagtacaaccaagaagagattagggcctatattcaccatcctaaaagaaaagaaatttcaactaagaatttcatatcgagcctaactaagcttcataagcaaaggagaaataaaatccttttcagacatgcaaatgctaaaggaattcattactatcacacttgccttacaagaggtccttaaggaagtgctaacatggaaataaaaaactgttaccaactaccacaaaaacacacataagtacatagaccactgacactataaagcaactacacaatcaagtccacataacaaccaactaacaacactatgacaggatcaaatcttcacatatgaatattaaccttaaatgtaaacgggctaaatgccacattcaaaaggcacagaatggcaagttggatcaagaagcaagaaccaactgtatgttgtcttcaagggacccatctcacatgcagtgacacccacaggctcaaaataaagagattgataaaaatccatcaagccataaagagattgataaaaatctatcaagccataaagaaattgataaaaatctatcaagcaaacagaaaacaaaaagagaagagcctgttatttttattttaaaccaaacagactttaacctaacaataatcaaaaagggacaaagaagaggattacataaagataaaagattcaattcagcaagaagacttaactgtcctaaatgtatatgtacccaacactggaacacccaggttcataaaataagttcttgacccacaaaaagacttagataactacacaataatagcaagagagttctgcaccttactgacagtattagacagattattgaggcagaaaactaacaaaggtatttgggacctgaactcaacacatgaccaaatggacctaacagacatctacagaacactccacccaacaacaacagaatatacattcttcttatctgcaaatgacacaaactataaaatcaaccacatgctcactcataaagcaattctcagcaaattaagaaaaactgaagtcacaccaacaacattcttggatcacagtgcaataaaaatagaaatcaataccaagaggatctctaaaaatcacatgattacatggaaattaaatagcctgctcctgaatgacttttgggtaaacaatgaaattaaggcaaaaattaagaaattatttgaaactagtgagaacaaagacatgacataccagaatctttgggacccagttaaagcagtttaaaagggaagttatagcactaaacacccacatcaaaaagttagaaagatctcaaattaacaacttaacatcacatgtagagaaaccagagaaacaagagcacaccaaccccaaagctagcagaagataagaaataaccaaaatcagacctgaactgaatgaaattgagacacaaaaagccatacaaaaggtacataaatccaagagttgtctatttgaaagtataaataagattgatagaccactagctagattaataaagaaaaaagaagattcaaataaacacaatcagaaatgacaaaagggacattaccaacaactcaaaagaaacacaaaaaaccctcagagattattacaaacacctctatgcacacaaactagaacacttagaagaaatggataaattcctgaaaacatataacctcccaagattgaaccaggaagaaattgaaaccctgaacagaccaataacaaattctagaattgaatcagtaataaaaagcctatcaaccagaaaaagtcctggaccagacaaattcacagccaaattctaccagatgtataaagaagagttggtgccaatcctactgaaactatttcaaaaacttgaggaggagggatgcctctttaactcattccatgagaccagcatcattctgataccaaatcctggcagagacacaatgagaaaataaaacttcaggccaatatccttgataaacatacatgcaaaaatcctcaacaaaataatagcaaaccaaatccaccagcactcccaaaagtaatttaccatgatcaagtaggctttattcctgggatgcaaggttggttcaacatacacaaataaataaatgtgatttatcacataaacagaatgaaaaacagaaactacgtgatcatctcaatagacgcagaaaaggctttggataaaattcaacatcctttcatgttaaaaactctgaacaaactaggcattgaaggaacatacctcaaaataatgagccatctatgttaaactcacagccaacatcatactgaacaggcaaaagctggaagcattatccttgagaactggaacaagacaaggatacccaccctcactattcttattcaacatagtacgggaagtcctagccagagcaattaggcaagagaaagaaataaaaggcacgcaaataggaagagaggaagtcaaactatctctctttgtggacaatataattctaaacctagaaaaccacatagtctctgcccaaaggttcctagatctgataaataacttctgcaaagtttcagaataaaaaaccaatgtacatttctatacagcaatattgtccaagccaaaccaggaatgcaatttcattcataatagccacaaaaagaatataatatctaggaatatagctaaccagggaggtgaaagatctctacaatgagaattacagaacatagcttaaagaaatcagaaatgacacaaacaaatggaaaaattccatgctcatagatgggaagaattaatattgttaaaatggccatattacccaaaacactttacagattcaatgctattcctatcaaaatacaaataacagtttttagagttagaagaaactatttaacattcatatggaacccaaacaccctgaatatccaaagctatcacaagctaaaaattaaaaaaaatttaaaaagctggaggcatcagaatcacactacctgacttcagactatgctacaaggctacagtaactaaaatctcatgatactgatagaaaaacaggcacatagaccgtattagtcagggctctctagagagacagaactaataggagatatatatatatatatgggagcttattagggagaaaggctcacatgatcacaaggtgaagtttcgtgttaggccgtctgcaagctgaggaaggaagaagccaagagtggctcagtctgagtccaaaagcctctaaaacagggaaaccgacagtgtagccttcaatctgtggctgaaggcctgagagcccctggcaaaccactggtgtaagtcccagagtccagatgctgaagaacctggagtctgatatccaagagcaggaggatgaaaggaagcatctagtacagcaaaaagatgaaagccagaagactcagcaagccagcttaccccactttcttccacctcctttgttttagccactgtggcagctgattagatgatgcccacccacattaagggtgggtcttcccctcccagtccactgactcaactgtcagtctcctctggcaacaccttcacagacacaccaagaaacaatattttaccagctatctaggcatccttcaatccaatcaagttgacacctaatattaaccaccacatagaccaatggaataagttagagaatctagaaataaagctgcacatgtacaagaacctgatttttgacaaagttaacaaaaacaagcaatggggaaaggactccctgggtcatacacagcattggaataactggatagccctatccagaagatcaaagctggactctttcctttcaccagatacaaaaatcaactcaaggtgggttaaagacttaaatgtaaaatcgaaaactataaatttttagtttttaaaactaatctataaaaactcttgaagaaatcctaggaaatactattctggatatcggccctggcaaatccttcattaagaagactccaaaagcaattgcaataaaaaccaaaattgataggtgggacctaattaaactaaagaacttctgcacagcaaaagaatttatcaacagactaaacagacaaccaacagaatgagaaaaatatttgcaaactatgcatccaagaaaagtctaatatccagaatctataaggaacttaaactaaccagcaaaaacaaaacaaaacaaaaccctaaaaaaccattaaaatgggcaaaagacatgaacagacacttctcaaaagaaggcacacacggccattaagcatataaagaattactcaacattactaatcattagagaaatgcaaagtaaagccacaatgagatactatctcacaccagtcaaaatgactattgttaaaaacaaacaaacaaacaaacaaacaaaaaacagatgctggcatgactgtggagaaaagggaacacttagatgctgttggtgggaatgtaaattagttcagccactgtggcaagcaatttgaaaatttctcaaagaactcaaaacagaactaccatttagccaagcaatccaattactgggtaaatatcaaaggagtagaaatcattgtactataaagacacatgtactcatatgttcaccacagcactattcaaaacagcaaaaacatggcatcaacctagatgtccgtcaacagtgtactggatgaagaaaatgtagtatatatacaccatgcaatgctatgcagccataaaaaagaattaaattatgtctttgcagcaacattgatgaagctggaggccattatcctaagtgaattaatgcaggaacagaaaaccaaataacctcatattctcacttgtaaatggaagctaaacattgagtacacatggatgcaaagaagagaacaatagacaccagggcctatgtgagggtggagagtgggagcaaggtgaggattgaaaaactacctattggttactacgctcatcatctgagtaatgaaataattgatacaccaaacccccacaacatgcaatttacccatgtaagcaacctgcacatgcattccctgaacctaaaataaaaattagaaagaaaaaaataataattaaaaaaattatctgggggaaaaataatttacattagtagcaccctcttgtcttcaggggatatgttctaagacccccagtggatgcctaaaactaaggatagcaaattctattgctgtcagttggaacatgtttcttttcatgtcttcagtccacatatttaatgacttttccactttaactaaattttaatcacacactgtgaccatcacttttacagtttgaggtacaacagcaaaactatcattaatttcttttttcttcttcacaatttcatggatagaagatttgttcttactgtagatcttagcaacctcagtgtatgattttcttttccttccttattaggtcaaaaacttttgccttttcacttaaaggaagcactttaagtcttatctgtggcatatctgaattgccagcatcactgctcttgcactttgagagtattacatgaaataagggttacttgaacccaagcattgccttactgtaatagtaagtctgataactgagaggactattaacaacatgggtatactattgtatccacaggatgcatccacactaaacaaagggagaattcacatcctgggcagggtgaagtgggaaggtgaggaatttcatcacagtactcgaaacatcataaaacttaaaacatgaattgtttatttctagaattttccatttaatatttttggaaccatgaattgatcacaagtaactaaaaccatggaaaagagagaactagtccacatgttgtttagtatcgctattacagtaattttctttttcttgtgtggtcttatcctgtgggcttctagaaaattgtttcctacctgcctctcaatccccttcctcttctcaactttcattttagcagaggctacattatagtgaccctgttggtttaggatttaaagaggcatttatttgatttgttaaaaacctccacatgcacccatgaaataaccaaatgacctcagggtataaatggagctgcaaacttgtccaagtcaagaaattcagtataaaaaccttaggcaggccaggcgcggtggctcacgcctgtaatcctagcactttgggaggccgaggtgggtggatcacgaggcagaatatcgagacaatcctggctaacatggtgaaacctcgtctctactaaaaatacaaaaaattagccaggcatggtggcgggcgcctgtagtcccagctactcaggaggctgaggcaggagaatggcgtgatcccgggaggcggagcttgcattgagccgagatcgcgccactgcactctagcctgggcgacagagaagactcctcctcaaacaaaaacaaaacaaaaacaaaaacaaaacaaacaaaaagaaacaccttaggcaacaacatatatgctagaattgcctttgctaactcccctggcaaagcaaatgatgtattgagattgcttctcagataaggtggttgaaaatgatagcaatcttaaaaaatgagcagttttcataaatttgtatacattttgctctatagacaaagagtagagcttatagctatcatggccatatctcaataaaaatgtgttgcaagcaggtttgccttgggcatctttccttattcctttcagtattccacttcttttcacaccctttcccacatgttagatgttcccagtctgctcattcagttcgggctcccttccctgggaggctgtcttcagctcaaaactttgccagtgataaaactccattcaaaacttatctgccaagtggccatttttacttgaagccctgcccttggtcaatgacagtgcaaaaactggatagtggcatattaatcaaataagtcattttctccctaggttaaaccatagggaatatctgctttcaacccttttggcctccaaaaaaaaaaaaaaaagcattttgtatggcttttcatacctcatggtgtcctagcttgagcactggagcaaagtcagaaaatctgagcccttgacttatctctgtggttcactgctggataatgtccagaaaattatttcatgcctttgagcttcagcttccttatctgtaaaaaggagagtaactaccttgacttcttgctgagattttaaagagaacaaatgtgaaagcacacacaatcaccatttgcaaagggtaaagtggtagatggatgaaaggaataatgatctgtaatttttccttacatgctagcctatttaaaatgtatgagcctccatgataagtgtggctaatagtgggggaatgtagatgatctagagataccggtcaacctacaatgtcagctttatgtcattgtgcccctttcttctttggggtttatatgactataatattttaaaaaccaaaaccttatgggaccattttataatttgtgtcatatgaaattttaattttgctatttatagtgaaagggaaaaaaggaagtggagtatataggatatagatctctaaccactaaaataaacctgtgagtaaatgcattttaagctcttcatgcaaatacatatatatatatatatacacacatatatatacacacacacacatataattactgattaaaaatatatataaaatcacatatatatacatataaaaccacttggcattcaggttgtataaaaatgttgatttttattcaagaattgtagagtagatggaaatttaatgtactcaatgtaatctctatttgggatgagattctagggggaattaaaatttacataggagtttctttgcctggtttagtccatccagaggcttcagatggtctgggaaccaactaaagttgtgtggagcaatgtaaaagtcagtatatatgtttcttttcccctggggagggattcaatagatttcatcgtattcttaaagaaattcttgtcctaccaaaggttaagaactaattatctcagttaaacaaaacacataaaaatatgtttttatatacatgttgaattattcaaatcttcagtgcttagtagtttattaatcttgaaggcctagaaagtgaataatttcaacaactgaacaaaaataaaatttaaaaagaaactattttctggtcattagaacaaacttgttataaaatatatgtctttttgctattgcttctccacttcaacactcatgatcatgttttgttgctatttcccctatctcattttttctggctgctgggttaaacttcctgtttttgcagaatgaccaaaaacattggtgatgatggaggtggagatgacaacactttcaatttcagctggaaggtctttaccagctgggactacctgatcggcaatcctgaaacagcagacaacaaatttaattctatcacaatgaactttaaggtagaggcaccaacttcaaaaacctgctgtttgtatttctaagagtaaaattggaggcattccatctggtccagtagtgcagtatcttgacaatttacatgaaagattaactcatggtttctgcctaccaagatcttgccatggttctgattataactggaaaatcttccatgacccacaacagcactattattccttaaacacttctcttctctaaatctggtaataaaataatgttactggattgaaataggaccatgagtaatcagaataagatattttaaaaactagaacaatgttcactaattatttacaggaataagcataatattgaagtgaccctaaaacattattttgtagttttttttttaattcactggaatgaagatttttagagtgaagactatcctaatatcagagcaatcacagtttgtttgcaagaattcttccttctgtcttacttgccatcgtttgttggcaatattcacctggtttgtggaatctcagatttagtttacattgtcattcctcacattctgatgattgtaaaaataacttttgaggttttgatacttttaaaatgtagctaagatattctattttgggtttttgtttgtttgtttgttttcatggatacaggaagctatcacagaagaaaaagcagcccaagtagaagaaaacgtccacttgatcagattcctgaggtttctggctaacttcttcgtgtttctaacacttggagggagtggatacctcatcttttgggctgtgaagcgatcccaggaatttgcacagcaagatcctgacacccttgggtggtgggaaaaaaatgaagttcgtctctgcatgctttttatgtgcttagaacctgacatttgtttcttttgtgggttatgtttctttgatggaacatttaaaaaggccaccctttacctatcccctatcctgcccttacagttaaccaaccctgttgctcattttccattctattctagtcttatttctaaatctggactgtctgtttttcattttgtgacatgatggaaagttagagtcagaaaagatattaaaaaacacatagtctaatcattatgttttacagatgggaatgataaatctcaagagattgcattatatgtttatggtcacagagttaggagaagagtcagggtgagaacctaggaatcttgacttcgagtccaaggctcttgctgctttctctgcaaatccttcatctgtcattaaaagatcaaattgttgcctgaactttttgaagcagccatgataaagccactgattcctatgttgatctcactggaaacactcagattgcttctccacctttgggcatgtctgggcttccctctgttttcattagaagcctaactgcagcatctccatctccatttcctcctgtcctgtaccttactttctctccctctaaatgctattcaaatgaagaaggccagctcttttccaggaattaaacattatgaccgtaatttgcctttagagtatctgcccatttagtgaatcagagaaaggaggttagacatagatcatttagaatcagaaaatcattggtcatgagttgttgctagagtctgttcccgttcataaaatgcttatgtgtatgatgtgacgtcattttgagcttgggcattttcaaagtatgtgcagatttaggctgtgggaagtgtagacttcccacactgaaacttttgcagaacagtatagatcaaaagaattaaaatatgtctttataagcatagaattttctaaaaaatcttggacagcaaatgatataatctacttacagaaaaaggttccaaataacattctgagtatttcagaagtggtaccaatagagacgggactagatattttaaagactttaatatacagtcatgtcataaaaacttgtaaaatataagtaatttagcagagggcttttatttatttaaaatgaaaaatgtaggaacacctcaaagcatttactaagtttgctttcaaaatggtctcataattgtaatagtacatagaggtaacattatcatgcagctttggtccattatttatattggttatgtttttgtataaataaaccatattaaaggatgggtagttgattatcaataaaataactattctttgtaagaacctctttaacatatattttagggaccctctgagtcctaggggccaatgaaggtaataatggagattcatgagtaactttacaaatttgataaaaccaaatttaaatttgccttgcataagtttgcacaggataagccaaattttctttacattagtctaaaattatagcatgctgattttgtattatgtcatgctgagatttggatcctgttggtcatacttatataatgttttaataaaaatgacaaaaatctaatagcaattgttttctaaatatagtctggtagttattataattattcacaccacgaagtccacaggagaaaataggaaatgtttagtggtgacagtttgagccgggtatttgggaaaggagatagtcaccagagttacctaaaatcggtatttccctattagaaaattagtacatgttttggattctttttattgacttcctttagccaaataatatcatcataaggttgccaaacatccaggaaataaaaagcacatgtttcctacttttcatgtttctattccttcttctttctctctcccccctctccccacccctgcattattctcttgtctctgaaattatagcccattctttcacttttgaaacttttctacgttggcttccataacattatgtcatgtgttctccatttgtttctctgagttccttctgtttcctttaataaaactcattgtatgtgtttatgttttcggccttaaaagtttacatttgccaaaattcaatatttaggcctaggcccatctcagggaattcatccattctaactgattaaactagcccatatgctgatgattgtcagattagaattttcagtttgaacctcctcctcaagcagattattttccatttcttttggaaatcttgttgtgaagtgcatcaccatatcagaatcagttaccacatagaacaatatgtgttctctgtgtagagactgatgtaaattgccaccttcactataccaggaaacagactgttactactggcacatacacacactcagtcacatgcctctcttgagaatgtgaattgaatattttccctgtcattttattgagatcaaattctaaacgtgcataaaatagtcatttttagtcttaaaaaagatcaaagaagcctagctcagaatcttccaaaattctggcaaaaagcaataataactttaaacaccattaacctagtttctcccttgtgcctccttgtagatgaacatggttatgtccctcctagggatgttctgtccaacattgtttgacttatttgctgaattagaagactaccatcctctcatcgctttgaaatggctactgggacgcatttttgctcttcttttaggcaatttatacgtatttattcttgcattaatggatgagattaacaacaaggtaagccttgtttctggattgtccttgccataagagtgttgttcaattcccagtctcaagtttgccagaaatgcctttgaaatctctgttgtcttcattttagtttctatctctttgctttctagattgaagaggagaagctagtaaaggccaatattaccctttgggaagccaatatgatcaaggcctacaatgcatcattctctgaaaatagcactggaccacccttttttgttcaccctgcagatgtacctcgaggaccttgctgggaaacaatggtgggacaggtaatgccaccaacagaagtgtatggcaattagtagattaaaaaaagagagtcaatatctcttccataagattggcttttaaaaaattgcttattagtaaaaatagctaagatttgttgaatgttgactgtgtgctggctctgaatttcatgtatattatctcacactgtttgcaaatctatcccttgaggtaaatactatttgtatgtcccctttacagttgcatataaaggaaggatagttgaaaatggtgcaaagagatgtttactatctgtattataataaagcactcgatttagatacaggccaaagcaaatatttaaatggaactctatttagtgttacttgtttgctgtaaaacaaaacaaaacaaaacaaacaaacaaacaaaaacagagtcttgggggtggccaagacagccaactagaggcagctagtgtgcatggctctcatggagagaaatagaggggttgagtaaatatagcaccttcaaccgaaacatccaggtacatgcattggatctaatcaaggaaacaacttgacccatggagagcagagaaaagcaaggcagggtgacagcccacctggtagtgacatgaagccaagggatccttctatgcccagggaagtggtgagtgaatgcacgaccttgggaacccatacttctcccgtggatctttggaacccttgtgtcaggagatatcctcatgaacccactccacctgggccttcagtccgacacacagagctatgtggagtctcagcagagcagccacttaagcacatgcagagacccgggagccttagatacctgggcttttctttttgggcttcctgtcaaaagtagctatacctctggcaaagcaggaggttagacccccaaccacaccccttagaaaaggggctgaatccagtgacagtctgcaggccccacttcacagcacctcacagaatgaaacccactggcttggaactccagccagttaccggtagaaatgttgcacctccctgagacagagctcctgggggaaagtgtgggccatcatctttgctgtttggttgacttggccattccatcattcaggcttcagagagtccaagccaaccagcggctgaagcagaccctgagcacagcatagctgttctatgaaaatgtggctagactactttttcaaatgggtctcctatccctttcctcctcactgggtaggacctcctaactggggtctccaaccacctcctacaggtgcgtttgggccagcaacgggtctgtacatttctgggatggagcttccagaggtgggggcaggctgccatctttgctgtttcacagccttcactgttgctacctccagataataaaacatctgaggtgaccagggacggatgtggggtcccaatatactgcagcagccctatgaaaaagtgaccagacttttacatgggtgcccatccccatatcggctcaccagacacatcctccaggcctaggcctccagctaccctctgctagaattatcgatcaagtagcagctctgtaactccctggacaggatccccaggggcaactgaaagttcctctgccactacctctgcagtagaactgcccttgctacccttggactaacaaaggaacaaagaccctaagcgcctcatccatacctccaataagctgcagttgactccaggagagaaggccagtctgtctctcacaggtcctacctacccccacccccctccttgtcaccagacagggaacccccagctcggacccacaacatagaacatccatcctgggctaattgcaaggagtaattgctgacctgcatctcaatggggtggagcccccaggagataagcaaaagacccttggccataaccatgccaaggtatcttcctctgctgctgccaagttggagaagaaacataacgctgagattgccccagagctgaaggggcagcccaggagtgccaagccgtaatctacagccagctctcaagggggaaagaaatctacactttcagagcattgagagggaacatggctgcaactgtgcggcaacacaggggagcctcacaaccaagcaagagtctaccaactgaccaatatgccgaagtgccacctactggatcacattccccaaagcatcaacaccaaaaatatctcactaacatacccccctctgaaaccaaagacaagtactcagcttcaaataaagaccctgtgcaaagccttggcccaatgaaaacttccaggaaagatgcctattgactgtattcaatctacattgcagttaaaggaacacctacacactgagatgagaaagaaccaatgcaagaactctggtaactcaaatgaccagagtattgtatgtcctccaaacaaccacaccagttctccaacaagagttcttaacgaggctgagctagctgaaatgactgaaatagaattcagactgtggagaggaatgaagatcattgagattcagaagaatggcaaaacccaatccaaggaaaataagaatcacaataacacgacactggagctgaaggacaaagtagctgttataaaaaagaagctaataggtctcataaggctgaataacacaatacaggaatttcacaatgcaatcacaagcattaacagtagaataaaccaagctgaggaaagaatcttagaacttgaagactggctctctgaaataagacagtcagataaaaataaaggaaaaagaataaaacgggaagaacaaaacctccaagaagtatgggattatgtaaatgccaaagctatgaatcactggcatccctgaaagggatggggaaaaagcaaacaacttggaaaacatattttaggatattatccatgaaaacttccccaaccttactagagaggcaaatttgctgccagtctttgctaacagtcaaatttaggaaatacagagaattcctgcaagattctacacaggaagatcatccccaaaacacacaattgtcaggttttctcaggtcaaaatgaaaaaatgttaaagacagccagagagaaagggcaggtcacctacagagagaacaccattaggctaacagcagatgtctcagctgaaaccctacaagccagaagcagtcagggtcctatattcaacattcttaaagaaaaaaaatcttcaaccaagaatttcatatcaggccaaactaagcttcctaagcaaaggagaaataagataatttttgggcaagcaaatgttgagggagtttgttaccaccagacctgctttacaagacatcttgaaaggagcactaaatggagtaaggaaagactatttgcagctaatacaaaagcatacttaaatacacagaccagtgacactgtaaagcaaccatacaaacaagccagcataataatcagtgaacaacacaatgacaggattaaatccatacatattaatactaatcttgaatgtaaatgggctaaatgctccatttaaaaggcacagagtagcaagctgtattaaaaaaaaagcaagacccaatggtatgctgtcttcaagagacccatctcatgcttaataacacccacacgctaaaaataaagggatggaagaaaatctaccaaccaagagaaaacagaaaaaaacatgggttattgaaattaaaattcccaatttcaaaaaaaaaatgcaaaaaacaaaacacacacatgcacacacaaatacacttcaaaccaacaaagataaaaaaaaggcaaagaagggcattacataatggtaaagggttcaatgcaacaagaagacctaactatcctaaatatatatgcactcaatacaagagtacccagattcataaagcaagttcttagagacctacaaagagacataggctaccaccacccaataatagcccaggccctgatgaattcacagctgaattctaccagatgtacaaagaagaactggtaacattcctactgaagctatttcacgaaattgaggaggaggaggaacttcttcccagctcatcctatgaggccagtatcattctgctaccaaaacctggcagagacacaacaaaaaaagaaatcttcaggccaatatcatgaggcccatcaattcaaaaatcttcaacaaaatacttgcaaaccgaattcagcagcacatcaaatggctaatccaccacaatcaagtaggcgtcatccttgggatggaaggttagttcaacatatgcaaaacaataaatgtgattcatcatgtaaaaagaaataaagagaaaaaccacatgattatctccatagatgcagaaaaagctttcaataaaattcaacacccgttcatgttaaaaactctcaataaactaggtattgaaggaacatacctcaaaataataagagccttctatgacaaacccacagccaaaatcataatgaacggacaaaagctgaaagcattccccttgaaaaccagcacgagacaaggatgccctctctcaccactcctattcaacatagtatttgaagttctggccagggcaatcaggcaagagaaagaaatgaagggtatcaaaataggaaaagagggagtcaaattatctttgtttgcagatgacatgatcctatatctagaaaaccccattaccccggcccaaaagcttcttaagcggataagcaacttcagcagtctcaggatatatcaatgtgcaaaattgctcgcattcttatacaccaacaacaggcaagcagagagccaaatcatgaatgaactcacatctacaattgctacaaagataataaaatacttaagaatgcagctaacaagggaagtgaaggacctcttcatggagaactacaaactactgctcaaggaaatcagagaggacacacacaaatgggaaaacattcaatgctcatacatgggaagaatcaattttgttaaaatggccatactgcccaaagtaatttatagattcaatgctattcccattaaaccacaactgaaattcttcacagaattagaaaaaaactattttaaaattcctatggaaccaaaaaagagctcgtatagccaagacaatccaaagaaaaaagaataaagctggaggaatcacactacctgacttcaaactatactacagggccacagtactcaaaacagcatggtactggtgcaagaacagacacatagaccaatggaacagaatagataacttagaaataaaaccacacaactacaaccatctgatctttgacaaacctgacaaaaacaagcaatggggaaaatatttcctatttaataaatgttactgggagaactggtagccatatgcagaaaattgaaactggacctcttctttacaccatgtataaaaattaactcaagatggattaaaggcttaaatgtaaaacccaaaactatgaaaactctaggagaaaatctaggcaatatcattcaggacataggcacaagcaaagatttcatgacaaaaatgccagaagcgattgcagtgaaagcaaaaattaacaaatgggatctaactaaactaaagagctccagcacagcaaaagaaactatcatcagagtgaacagacaacctacagaatgggagaacatttttgcaatctatccatctgacaaaggtctaatatgcagagtctacaaggaaattaaacaaatttacaagaaaaaaactggatcccattaaaaagtgggcaaaggacatgaacagacacttctcaaaagaagacatacatgcggcaaacaagcatgtgaaataaaacttcatatcactgatcattagagaaatgcaaatcaaaaccacaatgggataccagctctcaccagtcagagtgattagtagtaaaaagtgaaaaaataatatgctggcaaggtcgcagagaaaaaggaacatttatacactgttagtgggaatgtaaaatagttcaaccattgtggaaagcagtatggcgattcctcaaagagctaaaagcagaactatcattcaacccagtcatcccattactgggtatatacccagaggtatataaatcataaagacacaggcatgtgaatgttcattgcagcactattcacaatagcaaatacacggaatcaacctaaatgtccatcaatgacagattggatagggaaaatgtgatataccatggaatattatgcagccataaaaaagaatgagatcatgtctgttgcagaaaaatggatctattatccttagcaaactcatgtaggaacaccaaatactgcatgttcttacttatatgggagctaaattatgataactcatgaacgcaaagaaggaaacaacagacactggggtctacttgagggtggagggtgagaggagggagaagagcagaaaagataactattgggtactgggtttaatacctgggtgataaaataatctgtacaacaaactcccatgacacaaatttacctatgtaacaaagcttcacatgtactactaaacctaaaataaaagtttttttttaatggataatttggggagcacacactaagaaattttaataatgtcaatttttgttaaataattttcccttaaaagaaaaaaaatactattttaagttatttgttttcatgatgattttgtaaataaccccagcccaagactagccataccttaccagagaaaagaaataatgtttcatatggctttctatcccttaagggaaaccaagacaaataaaaccaaacaaaacccaagaaaaatctacttcagatctcgtatttttatacaaatccaatttatattttgaaaagcttttatgatttcatttagttagaattgatattcctaacgtgcagtccataaattgattttggggcttcagattatcattgagaacagcttttgtcataaagcttctgtatgttagacaacagttgagtttagcactgaatgtagtgtttgtgaaattatttgaacaattttttactgcattatttggtaagataacataaaaattgaaggactagcattagtcttataaaattcatataatttaaacaaatatgtaaaaatatatcttaggcttcaatcagatgctcatcaaacttaagccaatcaagatttcaactgtgaaagaaaaaaataagataaatgtgtaaaatgctagacatgtatcattaatgattgagtacaaaaattatggtataattgaaaattctattttattttatttgttaagctttcgggaaccagataaatcccccctttgatgatatatgctattaatttgattttcagacatgcacatttcatacaacttacaggaacatattacatatgaaataataaaatcaaagtcatctgcacttaatacaggagtgcttgtgattcaggatgtggtagacagaataatggccctctataacagtacacattctaatctctggaacgataaatatgttacatggcaaaatggactttgcagatgaaattaagttaaagatctcagcttgaaagaattattgtggattatgtgagcaggcttaatgaaatcataaggatctttataagcaggagataaagggaaaaagtcagaaaattgagatgtaacagcagaagcagaggttggaatgatgtgctttaaagatggaggaaggagattaagagccaaggaatgcaggtggcctcagaaactgaaaaagaaaggaaacatattctcttcccaagtctgcactttgaatttagacttctgacttccagaactgtaagaagataaatttgcattgttttaaaccactacatttatggcaatttgttacagcaacaataggaaatgagtacatcatggtacttgggtctccctgttccatggctttttgaagtgaagtctggttgtggtgcttaacacgagtctgttttatcacaactaagccgctccctaaatcttcagcatacgattcaagaaaggaaaatataggaagtacagttttagaaactgaaggaatttgagacgttctcttctgcacatcctagaacacaggttggcctgaaagctaagaaacctgcactttaacaagcaaaaacatctactgaatgggattaatagaattagctgtaaagagtaggatctgggctggccacttctggagtgaaggaatggattaattagataggaatgcgaatgcaatctaggagaatattcatgtttcagatgcagatggttctgcgatagtcccacacatactgacttaaaagagaagaaataccatttagttaatcctccaccttggaagcccgtggattatgctgcttgtctttttttttttttaaacctgtctgtagtgattttccttgcttcatcatattttcttactgccattttagttggatttcccccttatctttcaccttcctttctccaaggaagcattaagctctagtgggaaagtctgcagaagcgggccaagggaaaaggggttgtggttctgactggaatgttgattaggcagatggaatctctgggaacaaaaagaacatataggacataacaaatctgagtgctggcaaggtctggcctttaagagatcaatatctgtatccatgcatctaaaatttctattctttaattgcttaaaaaatatgcctccaaaaatagtaaaggcagctgctctgtatgtaatgttagatatgcaccctcattcattgttctatgagagcattacagatgtttcctcttctcctccatggataccctctgctttgattttctccaaggatgctatgagactcaaagcacttattgttttgaatataggataatgtgattgctcctttacttctgcagattcccaagcaatcatttagtttcatccccaatggatttgataggtgggcagcagagccattcctctttgaagctatatcctgaggtcttcactttggggaaggggagaaagcaacagctgaagataaaatggctaatgtgccaagtatttcctcctcaaatttttacgtttcattctgagatacgttatattattatttccgttttatagatgagaagactgagacttaggtaatttgctcaagatctctgagaaagtcaatgacaggagccccagttcagcctacatagtctgcttacagagtttgtgtctttgttcacagtgctaaattgtcccccagttagcatcaacacacactccccaaactcctgcctgcaatgtctatatttggtggccttttatgatgttccttgcctattgttttcccttcacctattaataaattatttctttagctttattgatcaaagctgcccaggcattttaactaacatcacgtgtgcaaagtttttaggtgtggagtgtggggtttagcaggaggcctgtgtgggggctgtgctccccatcctgacaagcacacaaggaactaggatgatatccttgagattggctgggctaccattgtttggattctctttcttttaaaatatatttttcctatggtatatgaataaacatttaaaatttttaatacaatgtttgaatcttcttcagatattttatgtgaaagttaggtcactgcttgggaaggaatagaatttcaacctttgggatgaggatgcttaagaggatgtggaggacttccaaaccactctgaaatgttttcttacctgaggaagtcttctagacctggcagtagaaacctaaaaatatccctcatagccttcctctaattgatgctagttattagaatctgagctcaacattgcctggaaagggtgggcatggaggcatgtgtctgtagtcccagctactcaggtggctgagacaggaggattgcttgagtccaggagttccaggtcagcctgggcaacatagcaagacccctgtctctacatacatacatacatacatacatatatacatacatacatacatacatacatacatacaaagaactgccttaggaaaggaaaggagacaaagagtaggaaggagaaaaattatgtccaaaaataaccacaggaatactatcattcattcattttttatttatgagtgtacagaaattgctgggcattgtgtgattatataattggaagtaaaacacttctcagcaaatgcaaaataactgaaatcataacaaacagtatctcagacaacagaacaattagattagaaatcaaaattaagaaactcactcaaaaccacacaactacatggaaattgaacaatttgctcctgaacgactcctgagtaaataatggaatgaaggcagaaatcaagatgttccttgaaactaatgagaataaagagaccatgtaccagaatctctgggacatacttgaaggaactcttcaaggagaactacaaaccactgctcagtgaaatcagagaggacacaaacatatgtgaaaacattccatgctcatggataggaaaaatcaatattgtgaaaacggccatactgcccaaaataatttatagattcaatgctatttccattaaaccaccattgacattcttcacagaattagaaaaaaaacatttttaaattcatatggaaccaaaaaagagtccttataactgagaaaatccaaagcaaatagaacaaaacaggaggtgtcacactacctgacttcaaaccatactacaaggctatagtaatcaaaacagcatagtactggtgcaaaaacaggcagacagaccagtggaacagaatagggaacacagaaataagatcacagacctacagtcatctgatctttgacaaacttgacaaaaacaagcaatggggaaaggattcgctatttaataaatgatgctaagaaaactggctagcctatgcagaaaattgaaatgggaccccgtctatacaccttatacaaaaattaacttaggatggattaaatgcttatatataaaagccaaaactataaaaaccatagaagaaaatctaggcaataccatttaggacataggcatgggcaaagatttcaagacgaaaacatcaaaagcaattgcaacaaaaacaaaaattgacaaatgggaactaattaaactaaagagcttctgtacagcaaaagaaactctcatcagagtgaacagacaacctacagaatgggagaaaatttttgcaatctatccatttgacaaagatctaatatccagaatctacaaagaacttaaacaaatttacgagaaaaaaacatacaaccccattaaaaagtgggtgaaggacatgaacagacacttctcaaagaagagattcacgtggccaacaaccatatgaaaaaacactcaacatcactgatgattagagaaatgcaaatcaaaaccacaatgagataccatctcacaccagtcagaatggtgattattaaaaagtcaggaaacaacagatgctggtgaggctgcagagagataggaaggcttttacacagttagtgggaatgtaaattaattcaaacattgtggaagacagtgtggcaattccttaaagacctagaaccagaaataccatttgacccagcaatcccattactgggtacatacccaaaggaaaataaatcattctgttacaaagatacatgcccacgtatattcattgcagcactattcacaatagcagagacatggaatcaatccaaatgcctatcaatgatagactggataaagaaaatgtgctatatgtacaccatagaatactacgcagcaataaaaaggaatgagatcatgtcctttgcagagacatggatggagctgaaagccattatcctcagcacactaacacaggaacagaaaaccaaacaccatatgttctcactcataagtgagagctgaacagtgagaaaacatggacacagggaggggaacaacacacactggagcctggtcgggggtaagggagaaatgagaacatcaggaaaaatagctaatgattgcaggacttaataattaggtgatggattgataggtgcagcaaaccaccatggcatgtgtttacctatgtaataaaactgcacgtgtaccccagaacttaaaataaaaaaagaagacataaaaaatttaaaaaaatacacaattcaatggtttctaatatattcacatagttatgcatccagcatcacgatagcattttgttttaggggcttacaatataccattgtgcagacatttaatttgttttatttaattagtctcccaagcatattcaaatttttccgtttttaatctggaagaagcagtactttcatgattgtatgtatagatttgtgcacatgtgcaaatattgctgtcataggcatttctaaaagtggattttcttgatcaagctccaaacactttaaaatgtgatggatcttaacaaatttcttcccaacgttgtgcccggtttaacttccccatcagtttatgctcatgctagttcaccacactcaccaatatgaagaagcatggattttacatttgtcattcgtgaggcaacaactcattgttttcatttgtatttttattatgtggggtttcggtatttttcaattttaacggaccgtttgtatatgttcttctgtgaatttttaatttgtgacttttgctggtttctttctttattggattgccaatctatattcatactgatttgtaaaatcttttaatgtgttagcaatactcaccctctatcatatacgttgcaagcactttttccacatttgtctttcaagtctgtaaatagtgctattcaccacataaaattttaaactgctgtgtggccaatattttcctgtttttggctctcgtatcatgtttatgaaatttctcagtaagaagaaaacttttgatttagtaaacgggaaataattattttttaagtaataaagtcagggtgaaatattttttatttacttgatatgactagttgttttcttcttttgccattaattgcagtcttcaagccaatacttctttagaaatatgacagatttaataccaacactaggaccatttgaagacagaactgtgtgttttaatagagataatatctcaacaggagtttgtgaggctgacagtctctgatgttctgaccacctacgtcacaatcctcattggggactttctaagggcatgttttgtgaggttttgcaattattgctggtgctgggacttggagtatggatatgtaagtatgatgttaattttgcttttttttttttttaaatttatttattttttattgataattcttgggtgtttctcacagagggggatttggcagggtcataggacaatagtggagggaaggtcagcagataaacaagtgaacaaaggtctctggttttcctaggcagaggaccctgcggccttccgcagtgtttgtgtccctgggtacttgagattagggagtggtgatgactcttaaggagcatgctgccttcaagcatctgtttaacaaagcacatcttgcaccacccttaatccatttaaccctgagtggacacagcacatgtttcagagagcacagggttgggggcaaggtcacagatcaacaggatcccacggcagaagaagttttcttagtacagaacaaaatgaaaagtctcccatgtctacttctttctacacagacacggcaaccatccgatttctcaatcttttccccacctttcccgcctttctattccacaaagccgccattgtcatccgggcccattctcaatgagctgttgggcacacctcccagacggggtggtggccgggcagaggggctcctcacttcccagtaggggcggccgggcagaggcgcccctcacctcccgggcggggcggctggccgggcggggggctgaccccccacctcccctcccggacggggcggctggccgggcagggggctgaccaccccacctccctcccggatggggcggctggccgggcagaggggctcctcacttcccagtaggggcagccgggcagaggcgcccctcacctcctggacggggcggctggccgggtggggggctgacccccccacctccctcccggacggggcggctggccgggcggggggctgacgcccccacctccctcccggacggggtggctgccgggcggagacgctcctcagttcccagactgggtggctgccgggcggagaggctcctcatttctcagacggggcggctgccgggcggaggggctcctcacttctcagacggggcagttgccgggcagagggtctcctcacttctcagatggggcggccgggcagagatgctcctcacctcccagacggggtcgcagccgggcagaggtgctcctcacatcccagatgatgggcggccgggcagaggcgctcctcacttcctagatgtgatggtggccgggaagaggtgctcctcacttcctaggtgggatggcggccgggcggagacgctcctcactttccagactgggcagccaggcagaggggctcctcacatcccagacgatgggcggccaggcagagacgctcctcacttcccagacggggtggcagccgagcagaggctgcaatctcggcactttgggaggccaaggcaggcggctgggaggtggaggttgtagcgagccgagatcacgccactgcactccagcctgggcaccattgagcactgagtgaacgagactccgtctgcaatcccggcacctcgggaggctgaggctggcggatcacttgcggtttggggctggagactggcctggccaacacagcgaaaccccgtctccaccaaaaccagtcaggcgtgtcggcgcgagcctgcaatcgcaggcactcggcatgctcagtcaggagaatcaggcagggaggttgcagtgagccgagatggcagcagtacagtccagcttcggctcagcatgagagggagaccgtggaaagagagggagagggagaccatggggagagggagagggagtaattttgcgcttataaggtttttcctttgtaattcgtcatttacacacactatataagagaaaggcatcatagagtttagtggatgggatcaccgttttaggtgcaataaatgaagaccaatgagtacatttataatgcagagaagttcagactcgagtatcatggtttacaatattctagtaaaattagcacaagatagcaaaagcaatggacctcaacttgtcagctgaaatgttgaactcagtaaatcttggccctgtagcccaccttctccctataagtttactagcatttctagaagcagggaaagatggctaatatcaactgcatattctatttatgcctttgaattctactaaactcctggatactatcatatgccagtcactgtgcagtagatggggtggataaaaggatttgataaatatggtacttgcttcacaaagttcacagtctaataagagctcgaaagagacacacacaagaggctgcagaaggttcaaggaaggcctagtttgctgtcatgcatctggcaagtggtggagctgaattctggcaggggcggcttcttttcctgaaacaatggctcaggtctctcagaaccacactggtgctgactccatcaccagctttccttctatggtcatcctcaggtcccccaacaaagtctgagggcaacagcacactcatcaccctgtgattagcacattgcctggtttccactgtcctcctttgagtcaaactggtctcagtcatcctggaaaatatgacctggggggttggtagtactcatttgcttaaaatcttccagtggcttctcaagtacttagaatgatttccaaatccctttctaggccttcagtaccctggatgatctgctccttttctttctctctcaagtcatttgctacctcttttgctcttgctttgtaaagttcacatgggcttctttttatgctcaaacatgggctgctttttatgctcaaacacaagatggtccttgcatttgtaattgctgtttctcccgcaaggggtgctgttgccctagagctaggaatggctggtttcttcttgtcattaaagactcagctattatgttacctccttagtgctcttctctgaccacctattctaatgtagccaatcaggcactgtttatatcaacacactgttctgttttcttcataagatgtgcatctatttgacattactcttgtaaaatgtactcatggtctatctccctctgttagaaagaatactctatgaaaatagaggccctgacctctcttatttgaactgtgtgagtcacgtagcaggcagcatgtgttggctggctgtttgaatgttgaaccttctcatttttgcaccatcaaggcagcactgtctattgccagaactctgcctccttcgaagcatgtgcccatggagtctcagtgtttgtaatgtttttgagttattgagccagtaatgcttctctcctcaccagtgagggaatatcctttatagctgatcttctatctcttttatctcctgccctctagtctctggatgagtccaacagttaggactgttttcaagatttcaggctagatctgtctggctgtctgactttgagatggtaccttttataaggtcgtctccatcaccctcattgaaagtgcctcctcggactggccaaaagcagttaggtaatgctcttcggtgaacgacagtgaggtaatggctacagatacaggatgctcttgtgttgctttcccattctttgctatgaggtattcagctggcttggtttcatttctattttccttacctgattcagctcctctgaggcagacataaaaattgccatttcttccttagaccattgcttggcttgtacttaccttttatcccttggctgccttcttcttaagtggcagaaaatctgagtgcaaatatgaagtcaatattacatgacctggatgcataaaagctgtaattaaatgactgtaatttattatttattgactgctgacagtgttcctgggttagtagaaagtacaggaaaaaagacaagttcctgttttaggtcacagagaaggaattttctcccacgttacctttggaaggctcaaaaaagctctgtcagaatcaaaacaagttttaaaacattaatgatggatgacgaatctttgatgtagatcccattgtcattgacttaccaaatggatagcttacacgggtgagggcctactaggtgcaagccattatgaacaaactctgtgctaggtgataaaggaatacagggatgtagaagatgtagacttacgtagaggttgcaaatttggcctgcagggtagattcagctaatggatatttttgtttggtatgcccagtggtggtgtttgtttttgtttcattttttatgagctaatattttaaaatgagagctcttacataaaaacacatggatttattgtttttcttgaaaggctggcaacattaaatctgtattcccactagggagaaattggctggagttgagaaaccactgccatctgcagttgggatattcattctccagttcctcatactcttcaccactcttttctcttacaagctcccgatataaatagagaaatcaattgtatggcccttgaagagaaagtgtgtgtgtgtttgtgtgtgtgtgtgagagagagagagacaggcgtgcatcagtagaaatgcagacacagaggaggagacatttgaactaagtcttgaagaatgatcaggatttcaagagatgaaagaaagaattcccggtggagggacaagtgtaagacagagcaccagagatagatagtgtgggcaatccaggcatagattaaaaaaaaaaaaaaaaaaaactaaaatgaggctgttttagagcagaaaaggctaataagaatgtttctctgctattctcctagacctgctaatcaataatatggtttcagaaagtacctgtcatgaagggaaggacaacctgagataggcagaggacatacttgagaattctgtcagaaataaaagataaaatcatggtcctttctactgtatgcatgcatgtgcatgtatacacacacacaaagcacatgatttttttcttctgaattccaaaaataatgccagtttattgtagaaaatttggaaaatataacaaagctaatatgaaagtaaaaatcataggtaatctctgccactaatgagattaattatttggattgttgaatcaaatagtgttagataacaagtgctacatatttatatatagtaacagatttttataaatatacacatatatacttttgtatacgtatatatgtgtgtaaacaggtagtagagtagactggttacttgcttttatttgttttacctaacactgatcatttcccaatgctattaactgttgttttgtaacataccttttaaatggttgtataatattctgtatgcaaatgtagtataattaatctaattagtttttaatttgctttaagttgaactgtctaattattcttatgataataagtgttgtgatgacatttaattatatccatgtacataagtatcttcatagataaatcatagtggatgtacaaattattttcttatgataaatttctctgagttgaattgctcagtcacagtagagggctttaaaaaagtctattcacttttattacaacagcctctgtagagactctgcagatttcagcattagattcagagatctatagaatgctaaagttaggtggattttgacacaaccagttgtaatgcatgtatttaacatatgaaaaattgcatctgtgaattgaaatgaggttcctaagtttatgtagccagagaataataaggacaatgaagtacacttctggacgaaaatgttatgttaaatgtattgatttctgtactggctctatctgagtaagctgggttaaaagggattgtgaatatttttcaagacacaaatttatggtcataatgttatcacaacaaacctatgaagattaactaaggtggaaaaattactggcttggagcagattaccagaccaatgtaagttaatgtaatgtaagttaatgtctccaaaggcttctctgagcacagttctcagtgtttcagaagagttcatgaggagtagaatagtttgtccctaggaaggattttaactgctctaatttaatacaaagtgtgccctcttgtaaactttgggttttctttggcagttcaatgcagaatatctttatcttcacttcagttttcattgacaccattcttactatttaccagcaaagcaagtaaagaatattcaagaagaaatagaattagattcagggcatgatggggtaagggaatgttcaataaactcagcatggtgttcacagttgtatttttaaggtgatcattgctcactcgtaagtgagagccgaacagcgatgggagacttctttaaagtctgatgaaggatgctcaggattatccataaataagaggcatataattgactgactaccttagtggattcccaatcatattatattgtattatgtcacatctcaatgtactgcttattttgtatcagaaactctacaaaatactttacatgtattattccatgtgatcgtaccagcaatgctgtgaggtggtattattgttcctactttacagtaaactgaggcttagaggatgttaaataattgctcaaagacacattaatggttagtggtagagttaggcctgaaactcgagtctcatcaccttcaaagccatcaaccaaatttccatcatgttgaatttacaccgtaatgcttgactctagaaattttaaaaattctgccaaaacttgaataattcatacactaaacctatggcttttggaactcaaagtgctcataggcttaggcaggctacctgtggtagaatggagttagcaaatgaactgggatacagaattagaagatcaactgttctctagctgggaacgtggagatattatatatcagttcgggaaggtagaatgataaagaatcaggaagaaatcatcagcatcccataaggggttgagaacatgggaacagggacaatgcagactgtattttaagtgttccttgaatatgtggacaggatctgtctgcagttaacaggatcctattctcaactagggttgaagtacaaagcctcaagtgctcaatcatcctagcagacgaggctagagtttgtcctagatcagtgcttctggaatttgagcatacatcagaatcccctgaggacctgtgaaaacagcatttctgattcagtagatctgaggccaggcccgagaatgtgcttttctgacaagttcccaggtgatgctgctgactctcgtctgaggaccacactcaaaagccactgctctggagccacagcccagactagcttgcagctctaagcagagtgattccagctgtgagaaatgggatttatgtgcagaaggtcaggcaactcattccacaacagaattaattctctctgagatcctgaattgcatttcatattatccacaggttggcaatctgcctcaaataatgaaacttgcagagagagaagagatcttcccaggctttttctttgtcaagtgagcaccatatgtcttccctctgggtggatgactgacttagcacatcacaagcaaaggtccaaaaattaaacaacatcatttccaatccctcaactatgatggactttagcccaaatccacatgggcttttctgatgctggcccccaacagtcttaccaggaatgagcagtcattagtgagtttattacacttagctcattcaaataattttatgatctcaaagttcaagagaatctgtttttttttctttttccctaaccgttttttacctttgagctttttctattttagagacaaacaaaatatattgcaaattgatttatatttattaaagtattgctttaaaaatttaaaatataatataacctaatgtttataaaagcctacctctaaaacaatgagcactgacttttatactacatatgtgtagtttttctgccttctcttttgttttagttttaaagtgagagcttctgtgtttattgcataagttaaattccatttctaaggtgtttacagagaagcaattctttcataactggttctaattttcaaccaataacgtatttttagactagaaagggatcttagaaatgaactagttcagaggttggcaaacttttgctgtaaagggctagatagtaagtattttagcttttgcaagccatggtgtctctattataactgctaaatgctgttgttttagtaccagtcatagataatatataaatgaatgaatatagctgtattccaataaaatttatttgttaaaacaggtggcagtccagatttggcacatgggccatagtatgctgacctttggtctagttcatttttgatttatgtgtcaggaaactaagcctaatgagataagtgacctgcccagcttacctagctaagaaatggtagagtgaagtctaaaatgcaggtttgaatcccagtcaaatgtctgttctacaaatccacttggtccagtatggccaccctgtatcctttctgtgcatcaggccaatttatagatcaagggggttgttcctccagctgtccctgctgcaaacacagcaggaagctagggaccctagggtgtcctttatgcttttctagtcaactagttataaaatgtctcatctctaatgaccctcaggagctctatgtgcttgtgagagagtgaagaaaacaggcatttaaaacgttgagttttctccacgttcagtagtttggtgggccacctcatgataccattctaaggaggcgaaggcttaagatttgatttttaaacagagacagagaaaggctgttccaaggcaacagatgggtacgggccaaccgagtaagcatttttcagatgtgttctgtgatcacacagggctccaggggaaaagtgctgaagatcatccagagcagggcactcccccagaaggaaaaagactcagagttaatgttctccagataagaagcagttcatttttctccatgaaggacacattttttttccattgatgatttcagcacaaaaactgtcaaccaaacctttttgcctcttgtgaacattgcccttctagaaagtcggcaaactaacgaaacactttgtagctgtccttcaacagtatctagagtgatactgcagttatccaggtcatctttgttctgtttaatacacaggactctttattatttcattatgtatcatcctatcattttaccttgagggttaaccattcctgttatgccatacttgctcttctttccctgaatctgttacaagggagattgtccctatgtttcagttgaataggagagtaatactgccttttaggaaagtgatgaagttgaggcctggattcatgagactcttgaggccaagcatttgaaaattgagaatggttttgttggagttccaaatcaggaaccaattctatctttttacaaatatatttttgagttcttgggtttgggaggaacagaggctctcttggatcatctttgtgtgtgtgtgtgtgtgtgtgtgtgtgtgtgtgtgtgtgtgtgtgtgtgttggggagggagctgttatggggatatgtgtggtctgaagcacacctggagataataagatctgagcagtgctaggaacctgccaatgtcttggtgtctttttcgtggtcttcttggccctctcatttcgtatttactgcattcttattcccttattaccagttggtcagtctcctctgattctctatcccaaattaaataagagccagttttattgcccttgctaattagcatttactccattgttagaatctcctgttaggatgcctaatgcatcaccaggaagcctttagatgggccaccctatcacagttaaccacttccattctattggttttttgtggctcctctgtacaaaaaacagcctagtgttgctgccctgagcatgaaggttaatatccaagacatggagactggacattgaattgagtaacttcttaagctttttttatatttcttttgctgtatttactttatgttaaagttaattcacattttcattgaaaaaatttttaatatgcaaaacttgaaaaagaaaaggaaaactatagttcatcacccgcatataaagtatgactatcttgctgattattttccagtctttgtgcatagtttcatatagttgattaatgtgtggctttatattttttgtttaacattagagcacagttttcctcatgtacataaatattctttcaaaatgattgtaattcattgcaatatatcatagtataaatatactgtatatacataactaatgttcaacacttagatggtttcatcattgcttgttaaagtttatcatcacatcagataattttattaagacagattctagaagttttcttacagaatcaaaaagaataagatttttaaagcttttaatatgtactgtcaaattgtttttctgaaaggttgctacagtttttactgtcaccagcagtgtataagggagcctgtcttgctgtactttcatagcattggatgacagcatttaaaaatgagtctcactgtgtttaaaaaaaaaaaggtgctttctttgttttatttatatctggttacttatcctagtgattattctgctattgttgctgaagggaagtaattgaaaccctagccatgcctatgcagaacaatttgcctttcagttttgaccatgtgagacgctaatccaatgaacattgtgtctcctctagccttcatacaccgaattcgacatcagtggcaacgtcctcgctctgatcttcaaccaaggcatgatctggtaggccagctgttggacagcttatcacttacagaaaagcctcccaggttatttttgcatacagcattgaatcctggtgttagaggagaatacaatcggtgtctaactccatatttacttttgcaaagtggatgcctgtatatagtttccttttctttcatatcttaaatgtcagtcatcaaaggtgtctctctgttttgcaaagcacttcttcatcaaataatgggagtctgtgttctggttagcagatttatttgaggactatatttttatattttgtgacgccaggatctaatattaaaacattaataattacattaccacatgataagtatgaaataaattaacataaggcctttccgagagaccgagtttattttgttgtcactactaaatatatttaaaatgtaacttatagctacttttaaaaataataccttatcaaatccaatagtttatcgagatgaaacgcatgttttaggaaggtcgagttaaaatatgatcttcattttgtaacttgttttatagggccatggcacatcagaattattttttttgatgtgtgaagggttgtcatatcttttatcaaattagagcattctcactgtaaacttgacaggttaagatgagtcgatacagtagaaatcgtttttgagtttaaaaactgaatcacgacatccgattcatctggggaccatgtgtcttggaaatctgtcacttcagatttccagcctacaagcagttacaataaggctactttatcctggggacatgtgcctaagacaatattatgctgccaaccataccattgtcctattcacaagtgccggtatagactcagtttttgaacaagtttcatatattgtaccaatagatctgtcctgaattattaaacctttgggtgctgacagacaccggacccctctgcaaatgctaaaaccgtcttgcttctgtcacacaaagacaactctccagggctccatcgtcctgccatgggatgactgttaaattcctgtgcctgactaggtgaatcaatatggaaaagatattataaaaatattgtttcctcctttgtcaggtaggtttaaaaatctaatttttattcccttcctttctaaattttccaagtatgactcacatgtccagactcactaaggaaggaaatgcatcctacattttccaagcagggaggaaagtcaaggtggcccgaggaacgtctactgacacagaagtaaagggagcagcttctgtgggttctgagctttcatttcctggagttcaatttgctgttatggcagaaaatggctaacacggctatgggagtaatgagaaaccactgttctatcagtggcttttacacaaagtgtcataaatccttcaggcctcatgggtaccattcacgcagacatatgctgcacgtcgattgtgttctttcagagttaagacaacagattggtctagaaatttgtttttattgtcagaaaagctgttataatggctgtcctgcttggtttcactactgattttgcaactatgttagtccactattgttcatattgaaattcttaaatatctaacatgtttttccagttctctcgtgggcagatccattatcaaaatctctgcactgtctttttctgtttattaattcttcagacagtggtcaagcttgcttctggctaatttgaagagaatattgagttttttgagcatacaaagatattcacacactttccaaagttccagaagcaaactgaccattattctattattcaccttcacgtcaatgcttggcacaaatattcttttcctaaccctaggaggctgatgagggagggggatgtcatgtagagggaggtgtggggcaggtgtaatgtaaaattagtaggctgactctgcacaaaggtcctcacacacaatcgttccattattttatgaagcatgaggatataatgcctgagcttaaccattttctacagaaacaattaaaaatgtacggggatgttttattcaattccattggcttgtgactggagatattgaattactcctttaggaatcgctgagtagtggaggttatttacgcagatgttgttaacatcaacatttatagataaaatccattttgctatgatttggttgaatgattagtaacctttatttacgcacttattttttgaaatacacatgatagtttctgtgctaatatttttaaatgatgaaagcacagaatatctttatcatagcaggatattgagaaatggcagagaacacacagtgagagagaaaatgagttttggacattgctccaacactgcttcactgggtactctcccgccaggtttatcacctttttttcttcactttctcagttgatcagatgtgaataatttacctgacatgtacatgtcgctgatgtaataaggagagttaaataaaagaagctttcattttctttgatcttccaggaagaaaagaattttataaggctaaagtgttacaatgatttttactgacagatgatgggatcatgcctgggtaagggacttagtgagccgagctgattagtaatgcatgagtaaagataggatgagcattaacattcggatattattatgccaggacttatttttctagcttatggctcttgagttatttgtttaaaatgtctttgtgatacttattttgaaattttgaaatttatttatagatgtatacacaaataataagcatatacatacaaacaatgtgcacgtatataggtacaaatatatgtggttttaggcaagtctcgattttgaattacgtgcaaaattatattttagaattgatcaggttatgcagcaatgaaacaacctcaaaatcgtagcagctcataaaaggaacatgttcaatgtggggtggaagaagagctttgctcttagaacttaccttcactttagagacccagactgatggaataggatccatctgaaacattgctatcacactagcagagaatgaagagaaggaaaaccacacaggacttttaaagtttctacccagcagtaaggacctaatttctattcatactttattggccaaaacaagtgatgtcaccacctgatttttaggaagactcaaagtgtattacatcaacatgtattggtattggggagtataatctagtgctttgcaattctaacccattagctgggactatcacttgcttacttgctcacttttttggcgttccctctctcttgctgtcctgtaacaaaagtatactgtattgttttaaaatctgtcttctcattagaaaaaaatagtttaacttcctacaaagtctttgttcaattcattatggtaaaatatcattcgtatctattgtccgaaatcttgtcaacaagacagcccaaattgtgacaatattccacttttcaaataaatgagttaactttgggttggcaaaagttcaattatagtggaaactaatttcttcatctaaattaaaaatgtctctataatgaaccaaatttacgttggattggctaaacaactattcagggagtacaaaatgctaaacctagctataaatgttgagggcttcattatagataggacagtttaaaagacagggctccccttacatttttaaaataagtgcacatatatcttctttttgattttgaaataataaattgctatttatattgatttatggtgctaatgaattttctcatccaagaagagtgaaacttattttgttgaaataatcaactaagccatcaagtaaaagtgaccacacctaagttgttcccacctaaaagtagtattttaaaatgcttataaaaactcagatgcacaaagcagagaattcccaagacaagctaaagtaagaaagtaaacagataaactaaatttaaataaatgtgtggaattttcatctcaaaaacctataagctagttataaattttcaataaaaccctattttaggaggcacaaacacatcattgcaattggctttaaaacaccatatcacctacaaagagaaaatgatcaacatcagaaagagaaaatttattttaatttttttctttcattaagcaaaaaacttttttcatttgtacagtcgtggcccactgcaaccttgacctcctgtcattaagcaaaaactaattattcatgacagaagtgattaatgcaaatgtacagtttttttgagtagaagaagtgactttaagggttaattatttttaacaagttatatttataggtgtattagtcaatgatataagtgttggggaaagtttattttagaattagaagaaagaagtaaaacaattgtaaatattgtttactctgttgtagtttaaattcactaatgatagtaggtatagttagttacagcatcctttctatgaaataattatgatatgcaattcctacaataatggggaaagtggcaaaatgtgtttagaagttggaaatagataagtgcagtttctttatgaaaagggtttgtctggttgaaagtggcagtgtattttctgcctttggaaaagaagcatgatgtcaaataaacaggtgcagtgtgactttgttatggagtaaagactcaaaactgagcagagttctgttttctttctaggatgggctccttctttgctcccagcctcccaggcatcaatatccttcgactccatacatccatgtacttccagtgctgggccgttatgtgctgcaatgttcctgaggccagggtcttcaaagcttccagatcaaataacttctacctgggcatgctactgctcatcctcttcctgtccacaatgcctgtcttgtacatgatcgtgtccctcccaccatcttttgattgtggtccattcaggtctcttgcttttgaaatttgactcaggcatcgtgttctttcgggggtggaggtgggaatggtcattcattgtataagctattttttccccccaaacaatgacatttttggttggtggaaatgagatcccggctgggcgcagtggctcatgcctgtaatcccagcactttgggaggctgaggcaggcagattacctgaggtcaggagttcgagacaagcctggccaacacggtgaaacctcgtctctactaaaaatacaaagaaaaaaaaattagtcgcgtgtggtggtgggtgcctgtaatccctgctacttgagaggctgaggcaggagaatcacttgagctcaggaggcggaggttgcagtgagctgagatggtgccattgcactccagcctggaggacaagagcaaaactctgtctcaaaaaaaaaaaaaaagaaagaaatgagatcctttgggtattcaggttcaataggtgacatggagattcttaggcaagttctgtctatttcctcatttgggaatcataaaagagaaaatactttatacttttccaggctctgcctgggtaaaatatgtatggtgaatctgagctgtttccatgttagaggatagctaagagcaaggtctgatgacagtggtctggatgtgagtttgcctgactctgggccgtcacatccagacgtggtcagctatcactacttctcttgtgcattactaccttaaaaagagagagagagagacagacagagagagagagaataccccacactttacctaggaaagagaattattactaaatactaatgagcataaggagggccacccaatttgttatccaaaatatcacatgctagtgaaaaaaattaaggctgttccacatatatattctctcctaattatcattcaagtcaggaatcgagagtcacaacggctccttgatccaatttagagatacacatttctacagttctctatgacagagctctcttctctctatgacacatatcagaaacctaagtccctgggatctggaggatgaagtttctttccctaaagggccttagaaatgaatctactacaagttctcccaagaatctctgcatgttgattcactggccagcatgcacttgagctgtttctccttttcagtgaaggaaatgagactgtaaaaagccatgtgaatgatatgcatgatgctgtaatgcccacatataattcctccattatgttgtcagacccaagttatttaattaaagtcaaaaggttcattgctgacagactaagtatataagagacattttcactcttaacagtagtctgagttattgctttgctggaaaacaagaaaatgttaagccagctgatcgagttaaactagctggacctctgtctactcagagaactgatgttgagaagctctgttaattccgttgtgtgtgtgtgtgtgtgtgtgtgtgtgtgtgtgtgtgtgtgtgtgtttccaagtgggctgaaataaataatgcagacagtgacatctggagactaaatatgaaattacagtcttgatgagacattcgtctcaataaattccgaaccaatctcagagtacaaagttcaaggaatatgccattcaaaggctttagttaattgcaaattattcacactacttattatccaggataagtttaggtgtgcattaagctattaattggaagttgatccttctcagtaaaacatagcaaaggaccctagctgcctgtaagggaaaccacacaatgtaaacatggatctccacagatgcattcagatttacaatacgtcttagacatgaacaatagttgcacaatttcagcttcttaagccctaactcttctggctttcctaattggcaaacttaggcaaaattatggcatgtaaatcactattttgaaatcagggaaatttattttttatttttaaaattatttatttgttttttaatttccataggttattggggaacaagtagtgtttggttacttgagtcagttctttagggtgatttgtgagaaatcagggaattttaaatattttcaatggagtactgggaagggttatctctatgctatttagattttttttttcatgtcagtttcctcactttagagccaaaggatgtttgcattgtttatttgtctggacttaaaagtttgaaaggattgtcctgctctagaaatgaggtgagaatgcttgtatgcttgtactagtgggtgcctcatagcttgtcatctttatgaaccccaagttttaggtgatttgcttaaccttcctggtgaaggttgtctgactctatctagatcctgggcaagcaggaatttaggaaatataaatttgaactaggttactggaggtatcacagtgatggctagttgctctccagtgtagggaagttttcaggtaagatggctatagtatatttatccattcagtaaagcaatttgatgagatattctagcttgtctggttttataagacctggctagagagggtaaattttccaagaaattattccaataggctagtaagtggatttatcgtaaatagttgacaatttaaagatgtccagatgaaggcaattctaattgttctatagcatttcctgacacctgatgtttcctcccatctatgtcaataattctgaacaatttatagttctctaggtttttatatacatccctgcttacattatgacaattttatttttcatatattttcatcttactgcaaagataatatgtgtttatgctagaaaacctaaacattgtagaaatatttttacatgaaaagaaacatggcccataatcttgaaaacctgaaataacaactttttagcattttatattctgttttgcctttcatgcatgatttttcataactgagcttgtactgacacaggatgtttctcagcctcttcactggactcacagaggggcaccctgtctactcggcctgctgtgcttaaccccttgtgggaggaagcacgtgggcaagtgagtgcgggatctggcgagacacactgggcactgacacaggagcaagctccatgtggggcccgtggccagaccaggtgtgtcaccttgaggagaatgcaatggtgcccaagtgcctatgaccctaaagccccagagggggtgttacaatgcttcctgagttccaccatcctcagcctgatggatggcagtgtcttagcagctcagttggccccttgcctcatcatgtggggcagctgccctccactggagagggcaaagggccagtgtgacagtctttcctgggttcccacaatcggtgggtcccaagctcttgtccagcatccaagaagaatgaggtcacatggattattgaaggatggtgaaggaggagaattttattgagtaatgaaattggctctcagcagagagggcagttggagaggggccaggaagggcaggtcatcttccccaaagtcaggttgtctcttctccaaagtcaggccgactcttccccaaagtcaggccgtctctcccctctaccaactgagtctgtggtctttataggcacaggatggaagtgtgtgctgactggtttgtgagtatgcaaaaaaggctaaagtgaaggtgtcactcaaaggtagacacgacagtatagaaacccaactaggaaagggtaggtatatgtaaaataggtgaagggtggggatgaatcagaggaaagtgcgccaaacaggaagacaagttctcaatccggtctgaggatttaacttggaccttggctttcaggctttaaactgtctttggcttggaggtggcatttcaccaggtacctgcccctatctgcctaggcatttggctgcctcctgttgctatcagtatactaggtgcaggttttttagtattaaaagttaaaattatattgtgagactgctattatattggtcatttgcaatcatgctttatgcatctatttttcttaatagtttagctgacttctagagattggggatagagaagtttcctctctgtggatctaggacacagtaaagtgctggtcaataatttgaatgaatgaatgaataatgactgcttattgtgcactaagcactagaagagacacagggttaagtccatgcattaagcattgattctggtcctgtggcacttatcacccagctgggaagacaggcctcctcataaactgttctaatctagagtggcgctatgcctacagcaggactatggatagacacagacaactggaaaacaattctgagaatattgtatgatagcatactttggctaacctggcaggagaaggcattgccagggacatgtagatgcgtccataatttgtacgtaattaagatatctggactcctttctttggtaaaagacctgacctgaaaaaggtacacaggaatccccagggacttagcaactttgctttgggtcacactggatgctgagaaggcctttgtgtgtagggataatttcataaaatttgaatgcccccactctaactacgttcatcagctatgacctgaggtgctggagaagggaggatagatggtcttatcttttttggtacttttaatttatctgcttatcctgtattccatctggctggggctgcattggggggtatgaacaatttggaatggtgaaaaataaaacatattggaatagggagttataatcttatattgcttgtaagcttcattccctcttatgtatcataagtcttgaaaattagagtgtagatctttaatttgtgaagcaaaacttgtacctctgtagtccaatgactactgacaaaatatatggagtcactatgtctgctggaagatagtattggttagaccaggagaaaaaaaccataatctgggacttgcgtgtcattgttatttagtagttgaaaatgcttaaagattaaaatacaaaagcaaaactaaacattgtattaaatgttgcaccaacatttattctgatgatgcatacaatttggtgaaacccaacccaaatctcttctgaaaattacatcttttcgtagtacaatcagtatgcatatacagagaaaataatgatgtaatgaatattttgaatattatggtacaattctagctattccttagtaagtcaagacatcctgttctcagttttctagtttataggagctgatacttgccttcatggagcttagcagtggagctaagctggtattcattagggcctgtccaggagaagaaactgagagggaaaaaacccatgattcggtgtggttaccttacctattaacatatctgatgaaggaagtctggtggaaaatgaggtggaagctattgcgtggaaagagatattggattatatgtggattttattccactgggctattccttgctctcatttccaaggctaattaaaaatacttagctcaaagagagtgttctcctacaagagcagctgactgagaggcagacttatgagctatttacaaaatatatttcaatcaaaatcttagaaatacagtttttaaaaatcttctcctaaatatgtggttaattttctaactgctttgactatatgtttatactgggatcatatttctcgtatcttacccatatattgactacatgaggtcaaagtgtcagcaagttgtagctaaacatcagattcctaccctgaaagaggacctaagcagtaattgagaaagatttccagttttcttgctttaaccatggtttttccatatgttcttaataaacttatctccccctttttaattcccccagtggcaaaaatagaatgtttgaagtcattggagagaccctggagcacgatttcccaagctggatggcgaagatcttgagacagctttcaaaccctgggctggtcattgctgtcattttggtgatggtgtatgtgcttttcctcctcatagaaagagcctctgtgatgttcttcctggctgtttttacatttcagctttttcagctctctcactctccctaagggttctgctgtaacctatccaaattcaacactgattacatggtggtgagaggctaaaattcatgagccatattctgatcctattggatgtaattcacaggcatctgcatctgtctttgcttccccaggattataagatttgttcccaagtaaccacaataattatccataaacagctaaagcaagggaaacataaatgctaaatgctaaatctaatcagtacattgagcttccccccaacaacccggcctccacctctcgttccataaagcagatggcaatgaatatacagaaataatgatcctctaagttaatattccccttgggggccctatagactatattttaggggcaagggcttcaagggtcttaaaaatttcactgtccttgttgttagagggccgccaataactgtgtgttcacgataatagaatcagaggaccagaggatcttgggaagttcctgtagtctgtcccttcaaagtcagaagtgatttccaaaggggaacttgtcagatgacttttgttttcacataactttcattggcttctgactcttggccatcacagataaacttagattctaagtaaaagtacagatttgctgtggaagagccaaaagcagcgtccatctcttcctttcagtccctgagtgcctcctacatagaatgtctggagctgccacgactctcagtcagtgggtaaatattaaacagccccagggacactttaagaacaaagttgatgcaaaggatttggttcatttaaataaaggtaaaacaaggaaatctcagggagaaaactcccagtggtttgcagtaaatgagcagggattgtgacccagttattgtcgtgatcacaagccacataaagtagtgagggcaggtttatcttcttcaattttataacctaagaaattgatttacacaaagaaagtgattttccctagacaagagagagagtaaaatggtcatagaaggacctgaagcagatcctttcacagtaaatccagtgctcacttctttatactgcgaggctttctgtgagggagagctaataacctgtagggataattaaacagtaaatcagattaccattatatattacataaccttgataatggggtgctattaagaatctgatagtaaatctctggcacagatgcattagaaaatgacctactgaatgcagcatgtttcaccagatggcctttgaaacaattttctttctctacatgtccatgatacagtggcttctgagagcatgttaatcagtatcctgtggcctttgagagtcaaggccctttagtggtatgaatgaggtgttgtttaaaacacacacacacacacacacacaatgtaaatgtcagatttcgttaccatattcttacttgattaggagacatgtttatttttaagtgaaggagtggcattgttcaaatgccttaatccaaagatttagtaatcagtcctaagagggtttaaaaggaattcacactgcctttgtttcaggtactatttacacactgactcatttaattcccataacagctttgagaagctggcttcattaatcatactatcaataacacattgaaattctgccccaagtcaagtgactaagtggaactgaaactcatgtcttctccttatttcctacactcacttgcagcaccaaacagggatcagaatcagtgggaatttcagatgggctgaaagccacttgtccgaggtggtatagacccagggtcagcacacttttcctaattcgagggccagaggcaaattaggccaagaggcaaaattgaggctcttaattaagtaattactaataataaccgtttaaaagacagaaaaaccattcttaattcatgggccatacaaaacagtctggcagtcatcttcatcctgcaggacctagtttgctttgatctggacagcctggaggaaagctggccccatgcaaatgtcaaatagatgtactgaaaggttgattgtggctctgaggttctgatttaaaacccagattttagcttattactgagtatattttttcaaattctgagatctcatcttctatttttggggcccatacaattggcttagctttttattacctttaattagagaattgtactagtatgttgaatttcccccaatggattatattaaatcaacctggatggctttcgggtatctaagcagagttcaggttagttctctgcaggcagtttcattcctttggagactagaaaaagatttgtgaggaatacttatttaacgtgcattacaaggtagaaaatcatggtggataaatagagaattccagaacttgaaaggacttgtgaaatctttgagttcatcttccaaatccaggaacttttctaagaaaatccttataatacacaccacacacaaacacacacacacacaaacatttattgagcacctatttcatgccagatattgccctgcatgcatttatgtatgtaattttagtaaaactcccatcactcatgtaagagataaacaaactcagccaaaccgtatcaataattgtgttgctagcaccagatggttcataaaggatactgtctttcattttggggagtagaggaaatgtgttcaatatccagttatttgcagcaaagagtaatataagttaccttttttactgcatttcttctttgtttgtttgttcgttttgccttaagtgaagataagcatatttatttttacagaattgtctggctagaatttgccctttctagaatgtaaatgtcatttaaaatccaataatattcctttatacaacgttttctttttgagggagaaagaaatgcaaacaatacattctacggaaaaaattccatgttcattatctatgcctatgaggattacattcttagctgcaaaggccaaaggacgaaatttaaggcagaaagtcgttttcctttttgttcggcatgttccctaagctgcagtaggttttccattctctgggatgccattgccatccatttaaaatgctactttcaattataatttaaacttatgtgaatacatttccaggaaaaagctaatattaggcagtgtgaaatagcagacagaacaggctgtggatcaggagccttgggccccaactttccaacttcaccccagcttcatccctatgtcatcctgaatgtatctctttacctctctggacctcagcttttatctataagacaagagatttagagtagaagatagcttaatgttcattcccatgctgatatttcataatttacttaatgtaaatttaagaagtatcttggggaactgaaatataccttacactgtattttttttctttttaatttagtttggccatctattatctcaatgctactgccaagggccagaaggcagcgaatctggatctcaaaaagaagatgaaaatggtatgatacaatttatttcatagaaatattatctttattaatgtcaagcagtagaaaacactgagaaatctacttttttccccttattttttattgtgtagcaagctttggagaacaaaatgcgaaacaagaaaatggcagctgcacgagcaggttggagatacgtttatgtttgtaatgtttgtaatttttctttttctttttctttcttttttttttttttttgctttttctccattggatggtgagtggcattattgctgtgagcgagtcattccacaatccttaccttccacctttttagcccttctcaggcatcacatccagggtatttggttgttttctagtgggaggaaaaaaagagaaatgaaaatgtgggcatataaacttggcagtagtgatttttaaaagtgaccttgaaaatgcgcagaaaatgaagaaatcccccatatagtcgtctacaaacagcagatacaaatgcagatgctctcctgcccatgttgactattttcatacatggaaggatatggcaagaagatcccaagagggtcctctgggctttccaccactgattgccagaagccctttctaatccattaaactttctttttttaaaaacctctttattttttaaagtattagagtaaagccaacttctagttgccaaaattaataatatgctttgagttccccacggaaaggtgatacctaagacctttagtgaaaatcttttccaactttgtccttactcctaactttaaaactctttacattagtaggactgtttccccactgtaagtaataaaacactcaaattggtttaattgagaaagagtaatttattcgaccacacaaatgcagggaaatggtatgtatggcttcaggccactttcttttttctatatatatatatattttttaattatactttaagttctagggtacatgtgcacaacgtgcaggttagttacatatgtatacatgtgccatgttggtgtgctgcacccattaactcatcatttacattaggtatatgtcctaatgctagccctccctgctccccccaccgcacgacaggccccggtatgtgatgttccccttcctgtgtccaagtgttctcattgttcaatttccacctatgagtaagaacatgcggtgtttggttttttgtccttgcgatagtttgctgagaatgatggtttccagcttcatctatgtccctacaaaggacatgaactcatcattttttatggctgcatagtattccatggtgtatatgtgccacattttcttaatccagtctatcattgttggacatttgggttggttccaagtctttgctattgtgaatagtgccgcaataaacatacgtgtgcatgtgtctttatagcagcatgatttataatcctttgggtatatacccaaaggattttttttcttttttgagacctggtctggctctgtggcccaggctggagggcagtggtatgatctcggctcactgcagctccaacttcccaggctgaagtgatccttcctcctcagcctcctgagtagtggggacagcgcacaccaccatgcctggataatttttaattttttttttgaagtgaggtcttgctaagttgcccaggctgctctcaaagtcttgggctcaggtgatcttctctttttggcctcccaaagtgttgggattaaaagcatgaaccactgtgcccagcattcagggcactttttatcctaagtttagaacagagtcaggtctgagcccacctctctgtgaatctctgaagctaaactcctttcacattggctgacctttatggcagcaggaatggatgcagcaacttccaatgccatgtccttagactgtaaaacttctttcctagaaattcctcaacctctcctcctttcagattggccccatatgggtcatgtatccatccttgtgccagtcactgtgtctgagtatggtaagttactgaagtcagtcaggacccatccttgaagctgggattggtctgttttcctgacacatgtgaaatgcactggggaggtcacacctacctaagagaaggagaaaaggatgctgggtgtccccaaacaacaaatgttcaagacttggttttgttgccttctttatgcttagccttttttcttttccctctctctatctagcatgcataaatgtaaagttgaatgctgggtgctgaattagatgattacagtgatgtacagttatcagactagtttttaatgaaatttttaattttttaaatcaatactacatgtgtgcataatttagagttccatttagaatttcataattctataaggcttatcatgaaaaacagcatcttcttctgcctcctacaccagttttgctctcttctcctcccctgcactcaaataccctaagacaaacactttcaatttgttagttgatttttagatatttatctccaaattacctaattttgttgtaatttcttgactttttagttttaagtattatctcttaaaattattaactacaatggatataataattttaatagataatatttaaacgatttttatactcttgccccagtctttctatgcattctacctatgtagttatattattattttggttaggccagtatacattattatggacacacagtcttcacagctaagccaagtagtaaactatgatacttgtgcatactttaaaattttctcaggattcataattcataatttctctttttaaacattttcttatttttatatatgtttcagtgatgcatttaatttccaaatctctgctatttattgagttatactctcaatatattcagacatattgggttatctgtccatttcatttccttagagaaatctttcccagaatcttctgcacttctccaatttcaactagtgtgtgtctgggatacagctgtcatcctttcatttttcttcactgtcattcaacaggatctctgtcactttatcctgttttggatactgtgttttccattttccccaacttcctctcttttggtctgctcacattttgccagtaagaaagggtatgtgagaggcaaattttctgagaccatgcctatctgaaattgttcttctcttactctcccttttgactgatagtttgggggtcaaaaatactcatctaattatattagaaataatatcccttcaaaatagtattttttcagaggtttcccatgccttttagattccacaattgctcttgagtagtttaaagccattgtgattcttagtctttcttgagcaacttgtatttttgattatctgtttggttttccaatctggaaagttctagggtctccttatctgcatgttcagaatttcatgatggtgtatcttgcatggatctatttttattccttgtgtactcatcaatggacttttgctctttggttgaagggaattttcttgaattgtttacaaattctttccatccattttctgtttttttttttttcatgtagaatttctaatttatttttcatccttaaattccctttgtctctttgctttacctatgaacatttccttatctttaaattttaacatttctcttggccttttcacttttgctatcataattttagtttctgcaagctgttttgttctttaattcttcttttttaaacagcatgctgtttttgtttaatggctgcaatggcttgttttgtctttatgagaatattaataactctttttgatgtttctttgcctttgatagtctgttttctctaagctgttttgttcttctttctcccctgcttggtaattcccctgctttgtgaccctcagctcatatttcagggtaggatgcaaaggtgggtttcgaagctttaagcacatggatggggcttgtgggcagatcctcattgggggactctgcctgggctgccgctgaacccccatgtcagtatttttaggcttctcctcttaagctgatcagattcctcagaaaaattacttccgaactcctgcccagagagtaaagatttgcctggcaaatctgtagcacctgagtgggaaaaacaacacgggtggggctcagctttcaacctacaaatgctcacttagccccctctttttactgcggcactccttgtggtcttctaacccagaagcatctctgttttactctttttagaaaaaattattccagtcttctgccagattaaaggtagtgggggttggggagcaattattcatttgtaccaagtgaagccgatctcagactctaactgctgctgtttcgttttttaataacccccacccctttgccccaccaagcttgactgcttcttaacagctaaaacatcctctttgtattggttccttacttccagaggtacctgttgctgcaaattactgaacgtttcagagattttatgtgtaaattatgttgcttactgtctttttcctcccctggcttagcttttcagtttgttagaattgataagtcattatcattaatctgtctgctttccagcttctaaaattttgtcattgatgtctcttcccctattctccccctccttgcaggtttatgcaaccttctccatcttcctccccaaccccctcaaaatttcttgactgtcatgtttgtgaaagggtgaaagttcaattcaatgtatttacctccgcagtttaggcaaacctttgtatttcctacactaggagaacaatggttttatgtccatcttcactctgttcatcccacagtgcttacctgaggtattattttgaaatagagtctgggatggagtctaccttagtgagaatttattagaattgtttagtctctgcagaagatgaggtggttgaagcacatacatcacatatactagcagtgcttttgtataatttaatattatcaaattagtacttaagaatggaaaattctgacttataagatctaaattctaattaaggcttattgttatctttattgttttaaatgataatataatgctatagcatgctattcatctgatattttttccataatgtgtatggccacccagtaaacacctactgaatatctactgaaaaatgaggaactcttttgttggaaaaatataaaatattcatcacataagcaataatgtataaatgttacaaaaaagtagtacattcattctgccttgtttagaatatgtgaagcctttgcaaactaagaaacatggaaatattttgaacattaaaatggtaaatattatgggaaagtagagcacatttggacaatacagatttctggccacctcattcagaaccattaagcacactgaaagctacgtttttatttgcctcctgttcatcttctctctctctctccttgttttttttttttttttttttctgttttgtgaacagctgcagctgctggtcgccagtaataagtatcctgagagcccagaaaaggtacactttgccttgctgtttaaaagtaatgcaatatgtgaacgcccagagaacaagcactgtggaactgctattttcctgttctacccttgatggattttcaaggtcatgctggccaattaaggcatcatcagtcctacctgagcaacaagaatctaaactttattccaagtcagaaactgtttctgcagagccactctctcccctgctccatttcgtgactttttttttttttttaacaaattgagtttagaagtgagtgtaatccagcaatacagtttactggtttagttggtgggttaattaaaaaaaatttgctcatatgaactttcattttatatgtttcttttgcctgagtttccttaaactgagagcagaaatatttcaccctttttcctctaagttcagaaatatttgcaaaaagtactcattgtaatcattcattaactcactttttgaaaccaataccttattttctctttttttctacctgtctccccaaccacgcgccccacaaatatattcctaaaacctttgtatttggtgctggattcagtatgaaaagaaatagggtttttagaagaaaaaaaaatcctatatgaattggggcctggatagcactgagttgaagatcttgaagatctcttactttgagaaggtacatgagtcttacacaacctagctttttatgagataaaattaaaaaaaaaaggaaagacatcataaatgactgttgttctctcacagtctgctcatttgtcttccaatgatcatgttatcagtggtgaatccatacaggtctgcatcaaactcgatacaattcttgcctccttggagggaagaattcagctgaggggcagaagtaggtttatggcagagggagagaatgaggcaagttttagagcaggagtgtaggtttattaaaaagttttacagcaggaacaaaaggaaataaaatatacttggaagagagccaagtgggcaaattgagagttccaagtgccctgttcagctttgacctgggtttctatacactggcatggttctggagtttgcatctctccccgcttgatttttttggcggatgggctgtccgtgtggatggtggcctgccggcagttggaaggagctatgtgtacaatgtgttactgaagttgtgtgcctgctcacttgtgacgttttcccttaccatccagcgttcctggaggaaggtcatatactagttaaactctgccattttgcttagtgggcatgcttgagcccacttgcccaactcctaagatctccggctcaggtgttttctatctattgggagactgtctttccctagcactggttgccactaattattattttagagagatagtttaaccaccacctgaccatcaccaaatggtcacctgacattcctgtgggatgggtggtggggggcctctcttgccctgcttatgtttttatgtttgcctaactacctactctaacaatcatatcctgtaagcttggattctaatgttctataatttttttctttgctttttttgttaaggtcaggaaaacacacttctgttgggggccttaatttatagatatgtttaagcattattatggatttacagtttgaattgactttaagtagtaacactcagtgccctcactagccttgttgtgcgactttaattgcatagcttaactcagtgtgcctttccaaaactaagccaatttgcttgccattccctgcagttgacttactgatttctattatcctgtctctgagtttctcattctttttgatcaccaaaaggcagccatagaataatcgcactgtttccctgccagttctaaactttattcctctggttgtctttttcagattgacttccattctcaatcttatcactccctttttaggattccttgggctcttatgtctgtaattcagagtctattatttatattgattttcatgtgacttgtaatggttccttattattttttgatgcatggattatctttcttgtccttattgtaaattctctgtgagcaggggttgtatcttctaactcttttgtatgcctagtatagtgctgtgcacaagtaggcgctgaataaatgcttgctaattaaattgaatcaatttaacttacagcaattgtgttatgagacaaaaacttctgttacctgcatgaaaacattttactatgatgtaagaaatggattatctgttgataggctgagtttattgtttaattagattataatgcagatgagtaaataaagctagtgtttatttcta

(The sequence listing continues in the following parts.)
